United States Patent Application Publication US 2008/0104729 A1 - sequence listing, part 4

SEQ ID NO: 16669 - DNA, 69 bp, Arabidopsis thaliana
  unsure at all n locations
  Clone ID: LIB25-012-Q1-E1-F1
nttgaagaaacacacagtggtattaatgcaaaaggctgacaanaagatcctgcaaagaaacanattggc

SEQ ID NO: 16670 - DNA, 888 bp, Arabidopsis thaliana
  unsure at all n locations
  Clone ID: LIB25-012-Q1-E1-F2
gnnnnnggaacgttatttgcncgcccggtccgaaatnaacgggtccanccacgcgtccggatttctttagacgcgcaaactgaaagagctttgatcgatcgatttggaggattcgtagaagatatgtcgagtatatacagaactgtttcgagaaaagagaaaccgagacgtcatcatggattgacgacacagaagaagcaagagattaaggaagcttttgagctatttgacactgatggttctggtaccattgatgctaaagagcttaatgttgctatgagggcgcttggttttgaaatgacggaagagcaaatcaacaaaatgatagctgatgtggataaagatggaagtggagctatagattttgatgagtttgttcatatgatgactgctaagattggtgaaagagacacaaaagaagagctcactaaaagcattccagatnaattgatcttgacaaaaatgggaaagatatcccccggatgatatccaaacgcatngcaaaanggactttggttaagaaatttcaccggatgcctganaataccaagaagatgggttgaaagaaaaccagaaccgaagaaccgtntaatnggtgaaantttaacaatnggattgaaattccatgaagggatgattaagggaaaaactggccttaangggngggnaacctaaaaaanggtttttttcccggttcctnaaacgaataatttggatgaagccnccaantaaaaanttcccttnaaccngaagggcttaaatttaaccnggtaaaaanttnttacccnggaannattcccnttttnccccaagtttttaaancccaaaanncccaaaccttnaaggggaaaantccttgggnccggtccnttggtnccaaaaaanaaa

SEQ ID NO: 16671 - DNA, 97 bp, Arabidopsis thaliana
  unsure at all n locations
  Clone ID: LIB25-012-Q1-E1-F4
tttcaaaggaccanatcctggtgntggtcaaaaactgggcctgccactttaaaaggggatccncaaaggtccacaagattncaagggcattccggaa

SEQ ID NO: 16672 - DNA, 592 bp, Arabidopsis thaliana
  unsure at all n locations
  Clone ID: LIB25-012-Q1-E1-F5
agtatntgtctagncggtcgtnncggaacataattcncgggnccacgcangcgtcngcaacacagagctgacgttagcatttgtctctgaaatcccagatccgaaaacccaacaatggcgtcagagaacaacggatccagatccgattccgaatccancaccgctccnaaagcngattccaccgtcgttgaaccgaggaagatagctctgatcaccggantcaccggccaggacggatcatacctgacggagttccttctcggaaaaggctacgaagttcatggtctgatccgtcgatcagcgaatttcaacacccagcgaatcaaccatatctacatcgatccacacaatgtcaacaaagctctgatgnaactccactacgccgntctcaccgangcttcctctctccgtcgttggntcgatgtgatcaaacctgacgaagtttaaaacccanttgcncaatctcaacgttcgntgtctcgtcgagattcctgantnnacagccgatgtnttcgcaacnggtgctctcccgtcacccttgaagcccgtcagatttcncaccaatccaacaattggncgttacngttnaagt

SEQ ID NO: 16673 - DNA, 512 bp, Arabidopsis thaliana
  unsure at all n locations
  Clone ID: LIB25-012-Q1-E1-F9
ggnnnnnnngnaantgtttactccngccggcaccggtccaaaaancccgggtcnacccacgcgtccgcacgtctagctctcacttttgttcgtctcttctgcgtcaaacatttccaccattttcgtttcttaaacctttcttcagctcttctcttcgtcaatctgcgatagtggaattgaagtctcttcggtgagtttctttactaatggagaccgccgcttcgagcgtagctacaantcgtggcggttcccttcagaatccgtcgccganggctccgtcaagaaaagagtggcgcgccgtttcggattcacaagacaccacagattatgtggatttggaacagttaaagctgaacaggacagatgagagaacgatttatgagaatgggagagaacaggatgggtattcaaataatgagatgttgcaacaacaagaatcctaaaggtttccaaaaaagaaaggngaaatacaagcaatttggagattgaacnttcgagctcaaatgantgcg

SEQ ID NO: 16674 - DNA, 771 bp, Arabidopsis thaliana
  unsure at all n locations
  Clone ID: LIB25-012-Q1-E1-G1
ngnnnnnnnggnaantgtttattctgcccggcccgcggtccgaaaataanccggggnccnggcncgcgtccgcaaaatttcaaacacaaaagtttcgtctccgatttaatctttctacgtcttggtttatgagctcaaaggagaagcccactctcggaggtacgcggattaagacccgcaaaaggaatattgctgctcctctcgaccctgctgctttttctgatgcactagttcagatttatctggataatgctggtgatctggaacttgttgccataagtttagagtcatctgatcttaatttctcaagatacggtgatattttctttgaggttgttttcattggaggacgtactcaaactggttcagtgaaatctgatgaaggggaacgccacccttactctataatcgactgtgaaccaaagcgtgaagctattttaccatcagttgtatacatacagaaaattttgcggaggaaagccttccttaataagaaccttgagaatgtttcacggagattcctacagtcactggagccttttgaggnagaatganaaggaagaaancttgcaaatantcacaagcacttgcattttcacaagaanctcccaaggattacctggcanaaaacngtcntccanncaattgcttaaggggaccccctggttngccaaagggaaattcccaantttgtaaaaganttctcaangaaaaattgggtnnnaanaatcctnnagcccttgnttncaatncgaggnttggaaattgggg

SEQ ID NO: 16675 - DNA, 432 bp, Arabidopsis thaliana
  unsure at all n locations
  Clone ID: LIB25-012-Q1-E1-G11
ttcttctggtgtaaaagcttttcttccacacacatttgagaaagaagacgaagaagaagagagaataactattccttcttcgccaagttctctgagctatagaagaaggagggatttcttcagaccgccattgttgcccaccttctctcctttctatttttcgccgcattttactcgcttactgacaaaagtcttctactcaagtctctctctcgctctctttggaggctcaattagggttttgttgtcgtgagatttgattacacaaattgctgaatttggtttcgattattggtgttattgttttcgaagatttccagtgagtttccgtttatggatctgactggaggatttggagctaaattcggcggtgttggaccgtgccgggaaccaatangccttgaatcgctacatctcggtgacnaattcgga

SEQ ID NO: 16676 - DNA, 413 bp, Arabidopsis thaliana
  unsure at all n locations
  Clone ID: LIB25-012-Q1-E1-G12
aaaccgaaggaaacttgggttcgggcatctcgccaaacaacaaagccgttcttgattactgcaagaaagttttcatgtacgcgcttgaggatcncagcaccattgttgaggaaatgggtgaagatcttaaccagatcgggagcaaaatcgaccagcttaaacaatggttaaccggtgtttacaattaccaaactgattgtcttgacgatatcgaagaagatgatttaagaaagactattggagagggcattgcaagctccaagattctcactagcaacgctattgacatcttccacactgtcgttagcgccatggccaagcttaacttgaangtcnaggacttcaagaacatgacangcggaatcttcgctccntcagacaaaaggagcagctcccgtcaacaaaaggaaccc

SEQ ID NO: 16677 - DNA, 388 bp, Arabidopsis thaliana
  unsure at all n locations
  Clone ID: LIB25-012-Q1-E1-G2
tcccgtcaannaatcngattacnaggaaggcnaacgtcttactcatctacncgacttgattcagagaggaattgagacgtccaagctttcgaatgtgaactcattacctgagaaganatggctcaagaagcaaatancgattgggatcaacgaagtcactcgagttcttgagaggatgaatcccagcaatactagtgacnaacaacaaaancctaaacaacttcaggtagtgatttttagtagcaagatttgtaaaccganggatgctgaccanggnatataccccaacttaactggcttcgnagaaaagttccggttcncaaaggtanggggacaacaanacgagcctcccctcaaaattaaggtgaatttgggtaancccaaagac

SEQ ID NO: 16678 - DNA, 861 bp, Arabidopsis thaliana
  unsure at all n locations
  Clone ID: LIB25-012-Q1-E1-E6
gngnntngnagnattgtctagccggncgtaccggaacntnattcccgggnccacccacgcgtccgcnaacgcgtccgcccacgcgtccgcccacgcgtccgtgtctgttcaagctcccattcttgtggccttcacgcttcaggaacaaagaccagtatctctctgaaagactacttctcggaaattttcgtctccatggcacccgtgagggggattcttggcttgcaaagggcagtgtccatttggaaggaaagtaacagactgactccagctttgagatcattcagcactcaagctgcatccacttccaccactccacagcctcctccacctcctccgcctccggaaaagactcatttcggtggtctcaaggatgaagatcggatttttactaatctctatggtctgcatgacccatttctcaaaggcgcgatgaagagaagtgattggcataggaccaaagatttggtgctcaaagggtactgattggattgtcaatgaaatgaagaaatctggacttcgtggacgttgtggtgctggtttccccttctggtcttaaatggtccnttaagcctaaagtttccgaatggccgttcctcctaanttggttgtcaatgccgatgaaaattaagcctggaaacttgttaaagaaaggganatttatncntcaatgaacccnanaaaatttttggaaaggggtttttaatnnccgggntttggaaangaaaccnaattncngccttaaatttaaatcagggggtgaaaaantntaaagancntttttaaanccaaaaaanggccnaaaaaaaaacntttnnacnnnggtccttggggaaaaaaccntnggttccgggnnanttt

SEQ ID NO: 16679 - DNA, 734 bp, Arabidopsis thaliana
  unsure at all n locations
  Clone ID: LIB25-012-Q1-E1-D3
gctttaattaccaatgggagagtgggtcatcggagctttcatcaacatttttggaagtgttgctattaattttggcacaaaccttctcaaattgggacataatgagagagaaaggttagccctacaagatggcggaggaaagatgccattgaagccaattatacataatcagacttggagagttgggatccttgtctttcttcttgggaattgcctcaatttcatttcgtttggttatgctgctcagtcccttctagcagctcttggatccattcaatttgtatccaacatagcatttgcttatgttgtattgaacaaaatggttactgtcaaagtactcgttgctacaacctttataagttcttgggaaacgttttccttgtancttttggtaatcancagtccancaagttttcaacaacccgaaacaatttngcaagaagaaaattataaccaatgttaacaattccctnggnccnaactggttgggaaattttggaatttttaaataanttaaccccgttgcaaccaaattttcccncccaaaaaaggggaaaggggaaaaaaaattttttgggaaaaanccnaaaaanccntgggaaccaangaaaaattttngncnccctnaattgggnaaaaaaggccgggccttncccttttccccaaaaaanncaanttgggccccccgggttgccaaaaaggggnttaangttcaaatttttaanttgnccaaa

SEQ ID NO: 16680 - DNA, 796 bp, Arabidopsis thaliana
  unsure at all n locations
  Clone ID: LIB25-012-Q1-E1-D4
gtgtgatttagggtacatttctgaaacatccaagtttggttcagaggatttaccggtatgtagacagtttagcttagaagagatagttaaagctacaaagaacttcgataagactatgatactcggtgaaagctccttatatggcacgctttacaaaggaaatcttgagaatggaacaaaagtggcaataagatgcttaccttcatcgaagaaatactcgataaggaatcttaaactgcggttggatttgctcgcaaagcttagacacccgaatcttgtctgcttgttgggtcattgcatagattgtggaggaaaagatgattacagcgttgagaaagtcttttgatttatgagtacattccaaatggaaacttccaatccttgtctctcagataatagttcangtaangggtatgaaattggtcaagaaangcttaaatggtcctcacaaggtgtttccaaaagctgttcaatttccctcacactggaattaatccctggaattcctcaagcaattagactccaagactaacaaccnttttgccttaaaccaacatccggttttgccaaacctaattaattaangggttggcccattggcccccgaaaccaacnngncttaaccaanttaaaccccgttccnttaaggttccggtttccggttccaaagaananaccctttgttttaaaaaactttttaaaagtgcttaaaccgaaancntnnactttnanccacattggggttttnccaanaatccgattcnaaantgncaaaaanntaaacccnccnaanncc

SEQ ID NO: 16681 - DNA, 760 bp, Arabidopsis thaliana
  unsure at all n locations
  Clone ID: LIB25-012-Q1-E1-D6
accttctcgtcttctttcggacaacaatgtcacaaaaagtctgatcctttctctttagatttggcttcgagaaatggctcgcgatcggcgggaaggtctggagatcaaggtggtgaatccaccggcggcggcgacaaacaatgtggctgtagaaacgtctccggcgacggcgacgaggagacggagacaacaacaacgagcttcgttcgctgagtttagaccgtttaagctttggtttccatggcttgttccagctatcgtggtggctaacattgcccttttcgccatttcgatgtttattaacaattgtcctaagaactcggcttattgcttagctaggtttcttgggagatttgctttcagcctatgaaaagagaatcctccttctgggtccttcctcctttgacaattgggagaanaatgggggctttaaaatgttatcaatnggtggntcataanccacaaggtnttggcccttgttcacttgttaaanggctacatccngggggnttttcaaaggtccttgccaacaatgtttaaccctaaccttcaatgggnantccaacttnaaccaagaaatttggatttgtancccattggattgccttaaangaaaaccgggattgggggaaatttgtaacctcccaaattaaccgggcgggnaaaccttggggccccggggcattattcgnttcctggggnaanctttaaagntcccaaatggncatttnccaaaatttnanccnttnancncttcnna

SEQ ID NO: 16682 - DNA, 711 bp, Arabidopsis thaliana
  unsure at all n locations
  Clone ID: LIB25-012-Q1-E1-D7
tatcatatttagtacagctttatcaacagcaatggtgttgtgctctcagggtatcatgaatggccagatgacagtcggtgatttggttatggtgaatggacttctctttcagctgtctcttcctctaaattttttgggtagtgtttaccgtgaaacaattcagagccttgtggacatgaaatcaatgttccagttgctagaggagaaatctgacatcacaaatacaagtgacgcaaagcctcttgtactgaaaggtggaaacattgagtttgaaaatgtacacttcagttaccttccagagagaaaaatattagatggaatttcctttgtcgtaccggcaggaaaaagtgtggcaatccgttggtactaaccgggagcggcaagtcaacaattcctaagatgctattcanattcctccacacagantccggaaatataaggattgacgggcaagatttaangaaatnagacanatagcctccgaaacctccatangaattttgccncaagaaacggtcccctcaatgaccaatattcncacatncattagganntncccanctncnaanaaaangttttnagncgccccgcnnctgaatcatnaaanaaccttattncccggaaaaaatccccatttttgggaaaggggcnatttatngtggaaaaaaaaaanggncttncccgnatttnaaacccnnnatcttttggnag

SEQ ID NO: 16683 - DNA, 441 bp, Arabidopsis thaliana
  unsure at all n locations
  Clone ID: LIB25-012-Q1-E1-D9
gaactcagccatggcttcttcttcttcttctcttctaatcctagccgttgcttgtttcgtctcgctaatctcaccggcgatttcacaacaggcttgcaaatcacagaacttgaantccgnnggtccgttcgatagttgcgaagaccttccggtactcaattcctacctccattacacctacaattcctcaaattcatctctctccgtcgctttcgtcgccactccatctcaagccaacggtggctgggtcgcttgggctattaaccctacggggactaagatggctggttctcaagccttcctcgcttacagattcggcggtggtgcggctccggtcgtgaaagacgtacaacatttagcagctacaagcagtctcgtcnaaggtaaaacttgcttttgatttttgggaatctacgcgccnantcgttaaacgggggtatg

SEQ ID NO: 16684 - DNA, 812 bp, Arabidopsis thaliana
  unsure at all n locations
  Clone ID: LIB25-012-Q1-E1-E1
nnnntnnngnaatgtttattctgcccgccgcggtccgnaaatacccgggtccacccacgcgtccgccnacgcgtccggacgtagttaaggataagacgggtttgccacaaaaaatggttgtattcaagctgagttctggatcaggagttagtttatatgttcgtaaaatggttcatgatgattctccgggtgaaatctctacaaccaagagagctcgaacagaggagagcaatatgagttctaagagacagaagacagaagatgaatctgaggagaccaaagaagcaaatgcaaagcaaagagaggctgataagacaaagctcctccttcataaaatccctctcaatgtcccgtctcaagagttaaaagtagttattaccgggcagttcacacttgaagttatgccacccaaaagaaaaggacgttattacaatgcagttgttacttttaatagtccagaaagaaagcaaataaaagcatttgaaaaagttaaanggagaaacaatttaaggagaaaaggtggntttggcacaaaaaaattggttgcgtttaaanctgaanttcanggtnaagggnccnttgtttaaacgtttccgtaaaatnggtcaaagantaaanctgaaggggaaccaaaganggcaaatgcaaanccatttttaaggatgatncatttaaaagaaaatgggaanaactgaagggaaaaanccaagccnatgggnttccatcaactgcaangnccntccaangaanttganaactgaaccaaaanccatgccaagggaattcgttannggcccgggaanttntccanc

SEQ ID NO: 16685 - DNA, 420 bp, Arabidopsis thaliana
  unsure at all n locations
  Clone ID: LIB25-012-Q1-E1-E11
cggttcacgtttttctcaatctgtccggagagagagaaactcaccggggaatcttgaaatcaccatcacatcctctcttccctcnatctccgttatcgactgtaaatcgaattttgttgttgctttgttttcttgggcgaataaaagaggataatttagtggnggggttttcgagaaagagagagaaagaatgagttttcaagatttanangcgggaagaggaagatcattancttcttcaaggaacatcaatggtggtggtagtagacaanacacgactcaanatgttgcttctggtatatttcagatcaatacaagtgtttcnactttccatcgtcatgtcaanactcntggtactcctaaagataccctgagctcagagaaaaactgcataagacaagantanatattggncagtta

SEQ ID NO: 16686 - DNA, 417 bp, Arabidopsis thaliana
  unsure at all n locations
  Clone ID: LIB25-012-Q1-E1-E12
tatcgaacacgaagcagaagacgattcgtggaagagacttggagagaatatttctcaatgtctcctctcccaatcttccatcgtcttcctcacgccangttctcttcctttctcctctcactgtctcaagctggaagttctaaaacatcagtggcattcctcaatgccttcaaatcagaagatatcattgctcgaattggactatggtggcagcttataagggctgttgtagttgtacctgtcttcaagttcctggtgcttctatgtttggtcatgtctgtcatgttcttcgttgaggttatgtacatgggaatcgttgttttgtatgtcaagctgttcaagagaaanccagagaaattttacaaatgggaagccatggnggatgatgttganttgtggcantgcaagctacccnat

SEQ ID NO: 16687 - DNA, 792 bp, Arabidopsis thaliana
  unsure at all n locations
  Clone ID: LIB25-012-Q1-E1-E4
gnntnnnggaantgtctattcggtacgncccggtccgacnatnaacggggccacccacgcgtccgtgatttatacaaatatatatctacaaactacaatgaataatttcattctcttatggcatatggtgctataaacaaacacacttaccacgcttgatcctacaacacatgaaccatggcttcttcaacccactcttacttcaccactttagcactaaccctaatcttgatctttcgtctcataccagaaaccaccgcatcacgccatctgaatggaaagaatccggcggtaattggagttaccactactagcgagaaatacattgttcctacgccgttaccaccgtttttacgaccctttttcccaccgttacagtttgccgctgcaccgttcggagggaatatcccacaaccaccgttaccttcaccacctccaacatttctaccgtgtctcccaggtttcaagtttcctccctttcagtcccgaaagcctacgccgccgtaatcgtatatacgttgacgggatcaagtctaaaactgtatgaaatattaaactaacctacttaangtataacaaccccaaatacaccgttgattancataaataattgangggaatatcanggnagaaactgtaataaaattacnggggtntaattaaaaattgataatncaaggttnnnaccaaaaaaaaaaanggggcgcccaaggtnaacttagtncnngatgnaantcaaccctcaaagnnccaatcattcaggcgcctttaaatcnnanggaaccgggttca

SEQ ID NO: 16688 - DNA, 72 bp, Arabidopsis thaliana
  unsure at all n locations
  Clone ID: LIB25-012-Q1-E1-E5
nggattgagaatttcttgtcaagcgtcnagtattcnatcagacagagttccagatatggaaaagaagaagac

SEQ ID NO: 16689 - DNA, 743 bp, Arabidopsis thaliana
  unsure at all n locations
  Clone ID: LIB25-012-Q1-E1-D2
nnnnnnnggaactgtctactctgcncgtcccggtccgaaaatncccgggtccacccacgcgtccgcangaataaagggtttgattacttctattggaaagaaaaaaatctttggaaaatggatcaaacagaggaaccaccactcaacacacaccagcagcacccagaagaagttgaacatcatgagaatggtgcgactaagatgtttaggaaagtaaaggctagagctaagaagttcaagaacagtctcactaaacatggacaaagcaatgagcatgagcaagatcatgatttggttgaagaagatgatgatgatgacgagctagaacctgaagtgatcgatgcaccaggcgtaacaggtaaacctagagaaactaatgttccagcatcggaggaaattattccaccaaggacaaaggtgtttcctgtcgtgtcctccgattacaccaaacccactgaatccgtaccagtacaagaagcctccttacggacacgatgcancggctcaatccgtaaggacgacgtttacatccggacaaaggaagaagaaaaangagaagtttccgantcaacaatcctccggtcccnaaattgtccagacnnnagnaaanaagaantttnagaagaactccatccangaagtccantngaaaaaatcccnggtcccccccgggcnttttcnggnaaccaaanggganntttanccaantttcctttttgccccccaaanttggggnaannaat

SEQ ID NO: 16690 - DNA, 438 bp, Arabidopsis thaliana
  unsure at all n locations
  Clone ID: LIB25-011-Q1-E1-E1
gtgtgagtttgaggtgaaagatgacggcgacgatagatcggaggttatcaacgctgaatccaaacgcgccggtgtttgatccggtggaatttcgtgaggtggaggatttttcaccgaaatggtgggatctagtaacgacttcgaaatggttccgtgacttttggctcagtgctaactctgagaatgagttcctcggcggcgacgatttctcagttatggaagaagagttcgaggagatgatcgcatcgtctgatggtggatccatggctgatacagttacagaagcagatgtggctagttatttgaagatgcttttgaacatancggagtctacgaaagagaagatttatagatcgaaagtttcgtcctgttcaccaaaagtataatcagaagaagtacatgaatcccaactttaaattgtcgcccggnatcatcata

SEQ ID NO: 16691 - DNA, 300 bp, Arabidopsis thaliana
  Clone ID: LIB25-011-Q1-E1-E11
gaaaaaaagtggggggatttataaatgggattgttataaatttagggttttggttttgggtgtccattttctaaaattttgtaattaaaaaggggggagagagagtggttaatttggtatctttagtgggaaataagagcgtagtgtaatcttccttattgtaacaaaaggaaaggctcgaaagagttttgaaatgtaaagatatcatttctctgcctttatttttgtatatatcattgcctctttttgaacagatgtaaatttcaaaggagttgatcaaaaaaaaaaaaaaaagggcgg

SEQ ID NO: 16692 - DNA, 447 bp, Arabidopsis thaliana
  unsure at all n locations
  Clone ID: LIB25-011-Q1-E1-E3
agttgaactttaagccaaaccctagcttgaggaggaagaggaatggtcggcgtgatgaacagattgaggaatctggacgcttaccctaaaatcaatgaagatttctacaggcgtactctttctggtggtgttatcaccctcgcctcttctattgtcatgctaattctcttcttctccgagcttcagctgtacattcacccggttactgagactcagcttcgtgttgatacatcaagaggagagaagctacggattaattttgatgttacattccctgcgcttcaatgttcgattattagtcttgattccatggatatcagtggggagaagcaccttgatgtgcgacatgacattattaaaaggagattagactcttctgggcaatgtcatcgangcaaaacaaagacngaaattggtcatactaagantgaaaaacctttacaaaaa

SEQ ID NO: 16693 - DNA, 444 bp, Arabidopsis thaliana
  Clone ID: LIB25-011-Q1-E1-E7
atgatcagagaactcgaaagactcagcaaactttgccatgaccatttggttagaccgatagggtttgttatatacgaagacgttgctctcttgttgcatcagcatttacctaatggtaacttaactcagctgattcatgagtccaccaagaaaccagagtaccaacctgactggccaatgagactgtccatagctgttggagcagcagaaggtttagcatttctccaccaagtcgccatcattcacctcgacgtttcctctagcaacgtcttgctagactctggttacaaagccgtgcttggggaaatcgaaatatcgaaacttctagatccctctagaggcaccgcgagtattagctcagttgcaggctcttttggctacattccaccaagagtatgcatacacaatgcaagttacagctccggggaatgtttacaagttatg

SEQ ID NO: 16694 - DNA, 447 bp, Arabidopsis thaliana
  Clone ID: LIB25-011-Q1-E1-E8
acagatgcttcttctgttgagccacctactctgtctagtactgtgcaaagtgaagcctaccacacgaaaaactctgttgtaagtcttggaaaatctccatcctacaaggaagtagcattggcaccacctggttcaattgctaagtatcaagtctgggttccacaagcggaagtttcagataagcaagaggatgatgagatggagaaaaaaactgaacagggtacatcaatggagcttacaagggatgagcaaatgataacagggttagaggaagaggtaaaaaaggaaatttctgcagacccagaatctaacataacccaaggcgaagaagagatcaaagtagagttacaaccatctgaaggagtactcggaggaagtcatataaatgaaaacgacgaatctgggggtggaattcaggttgaagaacaagtcgaagttgaattgata

SEQ ID NO: 16695 - DNA, 280 bp, Arabidopsis thaliana
  unsure at all n locations
  Clone ID: LIB25-011-Q1-E1-F10
ngngtnnnngcaacttcttttnggntcgccacgggtccancagancccgggnccacccacgcgtccgnatttgaaagaaaagaaggtttctcatgagtttgtgagctcacggtgaaagtccataagttatatatagcttgatttgctttcttacagttgttttgatatgacggatatacagaactcccatgtaatgacgtaccacagttgcgcataacgtttgaacgcttttattgatctatataatggaccttaaatcaaaaaaaaaaaaaaagggcgg

SEQ ID NO: 16696 - DNA, 503 bp, Arabidopsis thaliana
  unsure at all n locations
  Clone ID: LIB25-011-Q1-E1-F12
ngnnnnnnngnaactgtntattctgcncgccacggtccganaaancccgggtccacccacgcgtccggatcngacgggtggtgtctgatgaggcaagagctatgtacaatggtggcgtggccggtctgacatattggagtccgaatgtgaatatcttgagggacccgcggtggggccgaggccaagaaactcccggagaagatcctatcgttgccgcaaaatatgccgccagctacgtccggggacttcagggtactgctgccggtaaccgccttaaagtcgccgcatgttgcaaacattacactgcttatgatcttgataattggaatggcgtcgaccgtttccacttcaacgctaaggtaaatcttcttcacatattatatatatctaatatcgtatatagtaagaaaatattttgcaatttattatcaaatttatataaccaattttgcatgttttgtttcaaagtttgtatgcatgtttcatttcaaaattanattttt

SEQ ID NO: 16697 - DNA, 513 bp, Arabidopsis thaliana
  unsure at all n locations
  Clone ID: LIB25-011-Q1-E1-F2
gntnnngnaacgtcnttccgntcccacggtccanaaatcccggggncnaccaagcctncggnncaccgganctaaancncnattagggctttcgatggcttctccaaaagggattttcgatagcaattcaatgagtaattcaagatctgttgttgttgttcgtgcttgtgtttcnatggatggatctcaaactctgagtcataacaaaaatggatctattcctgaggttaaatccattaacggtcacacgggacaaaagcaaggacctttgtctacggtcggaaactcgacaaatataaagtggcatgaatgttctgttgagaaagttgatagacagagattgcttgatcagaaaggatgtgtgatttgggtcaccggtcttagtggttcagggaagagtactttggcttgtgctttgaatcagatgttgtatcaaaaggggaagctttgttatattcttgatggtgataatgttaggcatggcttaaaccgtgatcttaactttaaagctga

SEQ ID NO: 16698 - DNA, 450 bp, Arabidopsis thaliana
  unsure at all n locations
  Clone ID: LIB25-011-Q1-E1-F3
cgataacgaaatcatcagatcgccagaaaaaaaaaaaaaaaaattgcgaaatggagaatctgagctgcagatctgcgtcaatctccatctagatgttgttgctacttcttcctctatagaaccataatttcatcagatctcgctgattaatcatccccatttggatctgatcgaaactcttagggaagaacatggcaggagctgcctccgcgctgtttctgcttgatatcaagggacgcgttctcgtctggcgtgattatcgtggcgatgtctccgctgctcaagccgagcgattcttcactaagctcatcgagaaagagggtgattcacagtcaaatgatccaattgcttacgataatggggtgacttatatgtttgtacaacatagtaatgtatacttgatgatagcatccaagcagaattgtaatgctgccaatcctcncctccttc

SEQ ID NO: 16699 - DNA, 53 bp, Arabidopsis thaliana
  unsure at all n locations
  Clone ID: LIB25-011-Q1-E1-F5
agancgtaccattcacagtaatcgacaaggagaaagttctcagaggncggtta

SEQ ID NO: 16700 - DNA, 503 bp, Arabidopsis thaliana
  unsure at all n locations
  Clone ID: LIB25-011-Q1-E1-F9
nnnnnnnngnaantgtttattcctgcccgcnaccggtccaaaaaatcccgggtccacccacgcgtccgaaagtctagacaatgaatagctcgatgacgacgagtccaacggctcgagccttccttcatcttcactcgtcaccattcactttacgttcgagaaagtcaccgtctggagtttgtctagtctcgtggccgccttctcggtctcgcaggactcgacgactcgtttgtatggccgaaccttacctcattaggaaaatggagtctgttgagaagacatggaaggagttatcggtgaaactagctgacccagatgttgtttcgaatcaatctgaataccaaaaactggcacaatccatgtcggagcttgacgaggttgtaacagtcttcagaagattcaaggactgtgagaagcagttactagaaagcaaagttttggcgaaagangctggagatgatgaagatatgggctgaaatgataggaagtgaaatcaactcgcc

SEQ ID NO: 16701 - DNA, 446 bp, Arabidopsis thaliana
  unsure at all n locations
  Clone ID: LIB25-011-Q1-E1-G1
tnctttctctctcgtcatctctcttcctctctgtaatcccaaccggagttacgattccttcttatcgtaactcctgcttccgatctcgatccaattttcacttttgttttgtccgaacggtaaatcatttcgcggctttttttttttttaagggaaggaggaataagcaaattttgatttgattccgtttttttgggggtgttagtgatcttttagatgaagtaaagaaattttgattattgaggggattatgtgagttatggtatcatcggcaactatattgcggatggtagcaccatgttggaggcgaccttctgttaaaggagatcattctactanagacgctaatggtcgatgtgatggtcctctttggtataaagattctggtaaccatgttgccggagaattcccaagtctgtaatcaagctaataatcctctccaagaa

SEQ ID NO: 16702 - DNA, 500 bp, Arabidopsis thaliana
  unsure at all n locations
  Clone ID: LIB25-011-Q1-E1-G10
gnnnnnnnngnagcatttgtttagcccgccacgggtccananancccgggtccacccacgcgtccggaaaggggaagcaaataaattatcgaagcccactggtttcggagctgatcggtctctatttctctcttcatacatatctcaagcagataaagttgatcggatactagaatgggaggaggatttagagttttgcatttggtgaggccattcttggcttttctgcctgaggttcagagtgctgataggaaggttccattcagagagaaggttatctacactgtcatctctctcttcatctttcttgtctgcagtcagcttcctctttatggaatccattccaccaccggtgcggatccattctattggatgcgtgtcattcttgcgtccaaccgtggaactgtcatggagctcggtattactcctattgttacatctggacttgtgatgcaactcttggctggttccaagattattgaggttgacaacaatgttcg

SEQ ID NO: 16703 - DNA, 430 bp, Arabidopsis thaliana
  Clone ID: LIB25-011-Q1-E1-G12
ttacacaaaaaccctagatccacaacaatggcggaagagaagaaatcgaagcagagacatcgagtcatggtcttcgaatccatgtatcccatcctcgctcttatgcttatactcgtcgcttgcgtcgagctttgcgatgcagctactgttgtagatgtttatcgtctaatccagtacgatatctctggtgttccttttggttctcgtttctcttctcttaatcatcatgctgcttctcttagcttccaacgtggtgccgatctatctcgttctgtacttatacttcctcttcgtgagcttgacattgcttttgttcaagattacatctcgcaaaagcagtcgcttggtggattgttgattttgcttcctcagacgtttaggcctgggaatgttggtggtggaagtttaagctctgaaaatgatgggttta

SEQ ID NO: 16704 - DNA, 514 bp, Arabidopsis thaliana
  unsure at all n locations
  Clone ID: LIB25-011-Q1-E1-G4
ggnnnnngnncatcnttccgttnccacggtccacaaatccggggtcctncttcctctgatacccccagaaaaaacctagctccttccctcatttccccccaaatctcacgacttatttatgctcgggggagactaatcaaaggtcaaaatccattagggagggaatcgaatcncgatcgatctcaatttcttctgagaaaagaaaaaaatgtcatcggagattgaggtggtggaagaaatccaatcgaatcccaaggagaatggggaatcgagttctaaagggattgaagaagagagcttgaagaacgatgtctatactgctgccgcttatggtgatttggagaagcttcatagattggttgagtgtgagggttcctctgtttccgagcctgatgctcttggctactatgctcttcantggtctgccttgaacaancgcgtcgccgttgcccaataccttatcnagcatgggtgggagatttaacgcganggattatactggacanactgcatt

SEQ ID NO: 16705 - DNA, 497 bp, Arabidopsis thaliana
  unsure at all n locations
  Clone ID: LIB25-011-Q1-E1-D9
ngnntnnnngnaanttctattccgntcgccaccggtccacaaatcccgggtccacccacgcgtccgcacacgcgtccgttctctctgaagacagtacttgtttctgtccggcgttaaaagcttcggtggtggtctcttgacttctctgagaagaagaaaaggaagctgagtctcattttagattcagctcacgaggaagtgacgacgatgtctcattctagaagactttcgttggaacctgctatagattcaatcactggtcgatttcgtgatttacagagaaatgatgatgacgtcaacaaacctgattttcgagaactcgatctaggttctcctgtttctaccttaatgccacgtggctctgcttcttcttccgctgctgcgactcctactagcagctctggctcttctggctctgcttctggtaaaccgtcggtgagttctcagatggctaaacggttagatgatgcttacaagaatcattccggtgagctttc

SEQ ID NO: 16706 - DNA, 428 bp, Arabidopsis thaliana
  unsure at all n locations
  Clone ID: LIB25-011-Q1-E1-B11
gntatttggctatggtcacttgtagaggaactcaatttgagatgtttctgccgattgttggatcaaattatatatcatgatgtttcataatatttctgtttcctagacnantaaagtgtatcaatgcggagttggctagctttcttctgacagcgatggcttccttagcgtcgtcttggtcggcaccactccggaagcagtagcttacatagtatcgtcttgaccggatttcgggtttgtctccgccgttgttatgtttttcttccagttgtttatttacttacaataaattttattagggatgtgttgataatatcgattgaagcgaattatcgcttaatgaagtgtattattcgatgcttttacttttgaagtttgcaattacagganattgantcatancctttcaatgaantatggactcttat

SEQ ID NO: 16707 - DNA, 516 bp, Arabidopsis thaliana
  unsure at all n locations
  Clone ID: LIB25-011-Q1-E1-B2
gnnnnngnaacttcttcctgcncccaccggtccacaaatcccggggncnaccaagcctncggnacagccntcngacccaacaatgtctcncctcctacgaactttgcctctccgacctactcgtttcctctccgccacagccatatccatctctaacgctactaatttcttcgtcgnacccaaacggacaaacccacttcccggaactcgaagaaccttctccagttcccctgttgcagctgcctccggcgatgtagtagtgaagccggttccatctcctccgtcggttctccggtgggtgtcacggacagagctatgcggcgagttatcagtcaatgatgttggtaaaagagtccacctttgcggatgggtcgcccttcaccgagttcatggtggcctcactttccttaatcttagagatcataccggcattgtccaggttaggacgcttccggatgagtttcctgaggcacatggcttgatcaatgacatgaggcttgagtacgttgttttggg

SEQ ID NO: 16708 - DNA, 450 bp, Arabidopsis thaliana
  unsure at all n locations
  Clone ID: LIB25-011-Q1-E1-B3
tctctctcttaacacactcttattcttcagagagagaatgagaattccggcgacaactggtttttttgttttatacatagtttctgacttttgacggatctctctttccgcttagtcagattttaataattttcggtttagcttggttcgtttccggttaagatcggattatttttagttttattttttttccctctttctacaggatttcagtgtaaatcccgcttgctgtcaattggtttctttcatgttcatctgttggcttgactcttctccaaagttagagtaatatcttcgccgtaatgtcttcgtcgttatgcgaagtggacctctctatcggtcttgggcggagcttcntcctttgaagttgggggttgagatgaaagatctacaaaatcccctaatactcaaaggngggaaacaacatacccaaattgatttgtgggcggg

SEQ ID NO: 16709 - DNA, 447 bp, Arabidopsis thaliana
  unsure at all n locations
  Clone ID: LIB25-011-Q1-E1-B5
agctatggttttaccagagcttctcgtgattctagcagaatgggttctttaccgtcttcttgctaaatcatgttacagagctgctagaaagctcagaggctatggtttccagttaaaaaatctcctaagcctctccaaaacacaatctctacacaacaattctcagcatcatcttcataaccatcatcaacaaaatcaccctaaccaaacccttcaagattctctagaccctctgttcccaagccttacaaaataccaagaacttcttctagacaaaaacagagcatgctctgtttcgtctgatcattatcgtgatacctttttctgcgatatcgatggtgttttattaagacaacattcgagcaaacacttccacacgttcttcccttacttcatgctcgtggcttttgaaggaggatcgatnatcaagagcgattcttctcttng

SEQ ID NO: 16710 - DNA, 420 bp, Arabidopsis thaliana
  Clone ID: LIB25-011-Q1-E1-B8
ttgggtgtggggttgctagctttgggggatatctttttgacagagatgtactcgctttgtcatttgcacccaaagacgaacacgaggcacaggtgcaatttgctctggaacgtggtattcctgcaatgtcaatgttatgggaaccaagagattaccttttccaggatctgtttttgaccttatccattgtgctcgttgtagagttccttggcatatcgaaggtggtaaactacttttggagttgaaccgtgcattgaggccgggtggtttctttgtctggtcagcgactccagtctataggaagactgaggaagatgttggcatatggaaagctatgtcgaagctaacaaaggcaatgtgctgggaactgatgacgattaagaaagatgaactgaatgaagttggtgctgccatttacca

SEQ ID NO: 16711 - DNA, 419 bp, Arabidopsis thaliana
  Clone ID: LIB25-011-Q1-E1-B9
cctatctgaaacaacaacctccgtttgaggttttgccgggaaaatataaagttcacaggctttggtctctgcatttgcaatatatttaaaatggcagcagctttcttgaatcttggcggctatgttttcgttttcttctcttcgttcttagctatagtggccccacaggttcgaggcaatgttgctgtctttgatagctactggacgcaacgacaaagtgatgcattgaaacaaaccatcggctcttacgatcctcatccacttaacgtcaccaaccattttaattaccatgtcaatatagcagtggatgcatcggaatcaaggaacgatacaaggagagagcttactcaggtgagaagtggtcgtaaaacgcacaaaagcagcggaaaatgcctagcttataacccgatagacaactg

SEQ ID NO: 16712 - DNA, 432 bp, Arabidopsis thaliana
  unsure at all n locations
  Clone ID: LIB25-011-Q1-E1-C10
gctctctgtctttcgaagcagaagtgagactttgacgacaacagtgggaggaactatgagttcttgtgttgtgacgacaagctgtttctatacaatttcagattctagtanacgtttgaaatcccccaagctcctcaatctgagtaaccagcagagaagacgctctcttaggtctcgaggtggtttaaaggttgaagcttactacggtctaaagacacctccttatccacttgatgctttggagccgtatatgagtagaagaacactagaagtgcattggggaaaacaccatcgaggttatgtagataatctgaataaacagttagggaaagatgatagactctatggatacaccatggaagagcttatcaaggctacatacaacaacgggaatcctttacccgagttcaacaacgctgcacaggtctataa

SEQ ID NO: 16713 - DNA, 451 bp, Arabidopsis thaliana
  unsure at all n locations
  Clone ID: LIB25-011-Q1-E1-C4
tggtatggtagttgaagcttatgtgctctgtatccaagctcaagttgatatggcattaggaagatttgagaatgcggttgtcaaggcagagagagctgcgatgcttgatcnaaccaatcctgaggttgtatcagttttaaacaatgtgaagatggttgtgcgggcacgtactcgtggtaatgagctatttagttcggggagattctcggaagcgtgtgtagcttatggagacggtctcaagcaagatgactccaattcggttttgtactgcaacagagcagcgtgttggtataagctcggtttgtgggagaaatctgttgaagattgtaaccatgcgctcaaaagccagcctagttacatcaangcacttctacgtanggctgcttcatatggaaagccttggtaagtgggaagatncggttaaagattatgagttcttgagaagagaact

SEQ ID NO: 16714 - DNA, 400 bp, Arabidopsis thaliana
  Clone ID: LIB25-011-Q1-E1-C7
cagtaggctccaacttgagcaatcttgagagtggaaaagtttatcaagataatcatcactcagctgtggagaaacctgttttggtccaaaatacagtaagtagggaacaaatcgatcagattactaacatctcagcatctctagcgcagtttcttgcaaatggtcagcccattccacagcttgaacaggcattgcagctgcctctgcattcagaatctgttcaaccaaatcaggctactactcaaagtaatgtagtgagtagtaatccaaatcagctatggggattagggatgagcactggcgctgaaggagtccccgcggttactgcatcaaagataagcaatgtcgaagagattcaagaagtatcgctagatccaaggaaaacggggacaaaaagact

SEQ ID NO: 16715 - DNA, 429 bp, Arabidopsis thaliana
  Clone ID: LIB25-011-Q1-E1-C9
caagaaaacgaaaggaaaaaatacagaaatgggtggtttgaagtttcatgtacttatgtatccatggttcgcaacaggccatatgaccccgttcctttttcttgccaacaaattggctgagaaaggtcatacggtcacttttttgattcccaagaaagctctgaaacagttggaaaatctcaatctgtttccacacaacattgtctttcgctctgtcaccgtccctcatgtggatggtctccccgttggcacagagacagtctctgagatccccgtgacatcagctgatctcttgatgtctgctatggatctcacacgtgatcaagttgaaggtgtggtccgagccgtggaaccggacctgatcttctttgacttcgctcattggattccagaggtagctagagactttggccttaagactgtaaagta

SEQ ID NO: 16716 - DNA, 501 bp, Arabidopsis thaliana
  unsure at all n locations
  Clone ID: LIB25-011-Q1-E1-D1
cgtctttcagncnccacggtcanaaatcccgggtccaccacgcgtccgcacaagcgtccggtttatatctcagaaaatggcaaaaatcgtgatattatttgatttcgatcggactttgatcgacggagatagtgacaattgggttgtcactgaaatggganncncagagatcttccatcagctccgtttcactttaccatggaatcgtcttatggataggatgatgatggagctacaatcacaaggtagatcgattgatgacattaaatcttgtttgaagaaaatgcctattgattctcatattattgaagctatcaaatcagctaaatcttcaggatgtgatttaaaggattgtgagtgatgcaaatcagtttttcattgagaagatactaanagcaccatgatttggtgggattgcttttctgagatttacacaaatccaacctctcctgatgataatgggaacttgcggatctgccttancanagtgatgcantgccc

SEQ ID NO: 16717 - DNA, 415 bp, Arabidopsis thaliana
  unsure at all n locations
  Clone ID: LIB25-011-Q1-E1-D11
atccagattccgatcanagcatatctgaggaagaagaagaanatgatatttcgccgaaggagaatgcgaaggaacaagagagaggantactacttcaaacanagctcgaanaactcataggttgtggtgagctaaattatgctagggaaaccggtgatgtaactctggaancaactctacggaagatancatcctctcttgaanatgtggtcnaagttcctgactcccccgaggagagttatatttcttcttccagaacaantggattaccatgcatatctgctcaggaaaatgggtcanatgatgagattacacatgatgaacaaagttgcaaattggtctgctataagtnaaagaaancaagtcactaatccatttgaatggtgttgcttcagtcgcatcatcccatctatcg

SEQ ID NO: 16718 - DNA, 514 bp, Arabidopsis thaliana
  unsure at all n locations
  Clone ID: LIB25-011-Q1-E1-D2
gnnnnngnaangttttcctgccccacggtccaaaatcccgggnccnaccaacccttcnncncaanctctaggtgacttaagagtaaaaaatggtagaggcagaggttgaagtagatgtggaaatcaaatctacggctgataagtttttcatgttctctagaagatcacaacatgcctccaaagccactcgctatgtacagggatgtgatctgctcgaaggcgagtggggcgaagttggaagcatactcttgtggaaattaactgttgatggagagccaaaagtgtcaaaggatatgattgaggcgattgatatgaagatgaatatgatccagtggagggtgttagagggacctctgaaggaagagtacaatattttctcgaaaacgatgaaagtaagccctaagcaaggagggtctggaagtgtggtgaagtggaacttgaagtatgagagaattgatgagaaggtggctcacctagagangctccttcagttcttcgtcgaatgtgttaacga

SEQ ID NO: 16719 - DNA, 445 bp, Arabidopsis thaliana
  Clone ID: LIB25-011-Q1-E1-D7
aatcaacaacagcgacgactgcagccgtgccgagcactcatctcttcttctctctcagtctcgctcgccatctccgtggagatcctcggacatggtcatgagatcgtaagagagaatcttcaaaaaattgaaattggaaatcgataagctaggagctaaggagaaatgtcggggaaactttggatcccgagatttattctcatcactctactgtttattagctcacgagttaactctcaatgtgaattcagtttcactggacgcaacaaggtctttcatttcaacctaagcatcttcgattcggaattatcctcacggtgtgctcagcgaagatgggttttataaagtggaagcgaacagttccgtgttatggtttcagctttgtgacgtgctgattttcaatcatgatcccctcgatgtgttggttgcgaagatgtggaggtcc

SEQ ID NO: 16720 - DNA, 404 bp, Arabidopsis thaliana
  Clone ID: LIB25-011-Q1-E1-B10
tcgaagtggtcttcaaatctccggcggatggtaatcgtcggcggatggtttagactttagagataacagaagaagacctcatctttagagtccggagcgaaattaatggcggccatagctcgtcttccactaactcattctcttccctccatcttcaatccttcatccttcctctctcagtctctctcttttcctacttatctccatcgctctccctttcgctccttctcctccgtctctccaatcctctgcacctcccatcgcgattcgagatcgccggggagtgattctaatgcgtcgattgttggggatcttctggattatcttaatgaatcctggacacagtttcacgccactgctgaggcgaagagacagcttttggctgctgggttttgatccctcag

SEQ ID NO: 16721 - DNA, 432 bp, Arabidopsis thaliana
  unsure at all n locations
  Clone ID: LIB25-010-Q1-E1-F3
tgagtgatgctattaacgatgaaggcaagcgcatagagaatctggtcagagggatatttgctggaaacatctttgatctgggttctgcacagcttgctgaggttttctcaaaagacggcatgtcctttttggctagctgtcagaacttggtttcacgaccatgggtcattgatgacttggataactttcaagctagatggctcaagaagccttggaagaaggctgtgatatttgtcgataattctggtgcagacataattttgggtatcttgccctttgctagagaaatgctacgtctaggaatgcaggttgtactggctgctaatgagcttccgtctatcaacgatgtaacttatatcnnagcttgcanagatcttgtccaaacctgaatgangaaaatggacaattgatgggtgttnaaaccccaaatcc

SEQ ID NO: 16722 - DNA, 429 bp, Arabidopsis thaliana
  unsure at all n locations
  Clone ID: LIB25-010-Q1-E1-F8
gcccacgcgtccgcacgganatggtgtatttttgagtggttctacagtgcaattgactatccatggtttgccagacaagagtttgttgagtatttggatcangtnnggttgggtcatgttcctanattaactcgcgttgaatggggtgtcataaggagttctcttgggaaaccaatgcgattttctgaacagtttttgaaggaggaaaaagaaaagctatacctatacagggactctgtaagaaaacattatgatgaactaaacacgggcatgagggaangacttccaatggatttggcccggcctctaaatgtttcacagagagtcatttgcctgcatccaaagtcaagagagattcatgacggcaatgtcctaactgttgatcactgtangtaccggattcagtttgacaaccctgaattaagggtt

SEQ ID NO: 16723 - DNA, 513 bp, Arabidopsis thaliana
  unsure at all n locations
  Clone ID: LIB25-010-Q1-E1-G10
ngngtgggnnntnnnggcanttntntcagtgtcgncagggccggtnacggtcanaggcccccgggncgacccaagcgtccgaggacgcgtgggttgaagctaaatctctctctctctaactacctctgtggtacagagtctccgtgttctaaaagctttgagaccatcttcaatttcacagagaaaaacanaacaagcaaggagaagaaacatgancatcttcactaagaaacctaatcccagagaagtgcttcgggagagtaagagagagatgacacaagctaccagaggaatcgaaaaggaaatcggatctctgcaatcagaagaaaaaaagctcgttctcgagatcaaaagaactgctaaatcaggcaatgagggagcgactaagattcttgctcggcaattgatccgtctaaggcagcaaatagctaacttacaaggtagccgagctcaaatgcgaggcattgctactcatacacaggctatgcatgcacacacttcagttgctgctgg

SEQ ID NO: 16724 - DNA, 446 bp, Arabidopsis thaliana
  unsure at all n locations
  Clone ID: LIB25-010-Q1-E1-G4
taagcttattgctaganaaggtgaccaggttctgatcaaagtcgttaatcaagtgccaaacaacatctctctccactggcatgggatccggcaattacgaagtggttgggctgatggtccagcctatataacccaatgtcngtattcagacaggacaaagctatgtttacaactataccattgttggtcaacgaggcactctgtggtaccatgctcacatttcatggctaagatcaacaagtctatggtccacttatcatccttcccaaacgcgganttccttaccccgtttgctanacctcacaagagaagttcccatgatcnttgggggagtggttcancgcagacnctgatgcaatcatccgccaagcaacccanncangacgtggtcccaatgtctctgatncttacccngataaactggcntcctggtcattatacaatcg

SEQ ID NO: 16725 - DNA, 505 bp, Arabidopsis thaliana
  unsure at all n locations
  Clone ID: LIB25-010-Q1-E1-G6
ggnttggnggcgcttcttcttagncggtcngtacggaactnacattcgcgcggccgacccacgcgtccaaggacgcgtgggcggagtttcgtccgggaatctcctagatggcttatcgtaaagggtcgtaaagaagaagccgtctcaattctccaaagcattgcttctaatgcaatcactatgagcttcacaaacttatgttttgaagtagaaaatgatcaatccaagtcaaatcctgatgtttatgatgcgttaaagatcttggtgaggaaaagttggtcgtttagaagattattagcggcaatggtggttggattcggtatcggtatggtttattatggaatgccattagctttaacgaatctaaacttcaatctttacttangggttgtgttcaacgccttgtctgagttcccagcttttctgataacgtttttcttcattgataaaatcantaggagagatgcgttgatcggatttacagctctaagtggaatctctancc

SEQ ID NO: 16726 - DNA, 508 bp, Arabidopsis thaliana
  unsure at all n locations
  Clone ID: LIB25-010-Q1-E1-H1
ggntttngcaattcntcnnggntnnccaccggtcanaanatcacgggccgnccacgcgtccaaggacgcgtgggaaaaaaaatcaaaaataaactcttgagcgatgagcaaccacctcttaccaccggagaacaagatcccgactctcaacttcgaccatctagagattttctcagcccttggacgtggatctaaaggagttgtgttcttagtaaaagccgataacaaatggcttgctttaaaagtcatactaagagaatcaatcgagtcaaagaaggccaaagatgagtacaaacgcataagtttcgaacaaggagtgttgtctcgattcgaccatcctctgtttccacgtctcatggtgttatatccaccgataaagttatcggttacgccattgattactgtcctggaagagatntcaactcctttaaggaaaaaacagtcgggaagaaatgttttccgatggagattattanattttaacnccggcgganccttttnattgcnc

SEQ ID NO: 16727 - DNA, 452 bp, Arabidopsis thaliana
  unsure at all n locations
  Clone ID: LIB25-010-Q1-E1-H5
caatgaaaggcgtctcctccaaaaaccaaaaagttattgaatctctctctggctgattgattaatggctgaggagaccgtacgtttgcctaattcgccggatgtaaacatatcatggagaaggatttctactggaaaactgagttttttatacactcaagagaaagttgttcctaattatctcagatctcccactggttcttgtcatgatgcttgtaaatacggaaggaaagatgaatctgaagacaagccaagagttccacatcgcaaaanggttaacaaaagcttttcctgganctaaaaacttggattcaacactgaaggaagaaaggaattgacaaaaccgnctgttgantccctccncgtaaaatgtgaatccggttgggtngcctttgatnattccnaanganccaaagttnagnaacctttccaacngganttttggtgaangtt

SEQ ID NO: 16728 - DNA, 506 bp, Arabidopsis thaliana
  unsure at all n locations
  Clone ID: LIB25-010-Q1-E1-H7
gnnttgnggcatttcnctgcgaaagcctagtngtctgnaantcttcggccctcgaacgactcgaaaagctcngnnnnatactttncngtancatcntatctctatctatttatacaaacccttttcatctggcatcttcagttcagtanaatanannaaagcatctaacgaattttacaagtaagtgcgtttatgagtgatacanggatatcagcagtagcagttgctgctgctgtagtggtggtaactacggttacggtatggatatggaaaggtctgaatgtagcttggcttagaccaaagaaaaatgaggcttatctaaagagacaaggtctctctggaactcctttcacctttcttgtcggagacattaaaagggaagccagtatggtggagcaagaaaagtccagacccatcaatctaactgatgattacacgcatcgtgtcatgcctctgatacaacagaccgttaaggatnatgggaagacatcntacatgtggattgg

SEQ ID NO: 16729 - DNA, 488 bp, Arabidopsis thaliana
  unsure at all n locations
  Clone ID: LIB25-010-Q1-E1-H9
taaacnctcctgcnggacggtntaggtcanaagnncccgggtcgacccacaacgtccgatgattcttctgctcggttctcgccggagagaagacacggagaagagggttttcgaaaaggaggatgagaggttccaataacaccgatctatttgaccctaagacggagatggattccaatttctctcgccatggttcttcctccgaaggtgattttggtttcgctttcaatgacagtaacttctccgatcgtttgctccggatcgagatcttgggtgggccttcggattctaggtctgatgctgaaggatgtacgagtattgccgattgggctcgtcatcgcaagaggagaagagaggacaacaagaaggacaatggtgttgcgatttcagacattgtggcatgtgctgaagaacagattttaaccgataacaaccaacctgatatggatgatgctcctggtggtgataatcttgacnatgaaaggaga

SEQ ID NO: 16730 - DNA, 432 bp, Arabidopsis thaliana
  unsure at all n locations
  Clone ID: LIB25-011-Q1-E1-A1
ttttatcangcccgnacggnccanaaaatcccggggccnaccacgcgtccgnattgccggtttgaaccatcnaggctcgcgaaaccgggtatggtgaaaaccatgttcttccgctggatccgtctcgaagatgttatcggctttgatagcaaagacacctcttcgcgaaatcttgaacatcnaaaactgttgggagattggtcttgatgcgataaccggatataacgaaccggttaatgaagttggttttcaagtattgttccttctccggcgcagcaaancaacactgggacgttgcccaataantcaagatttttcaaagntaccttttggggaaaagttccaaaccgcctttnnaatttcnccnaaatttccnaaacaaagntttaaagtgggnaggggaagggcnaataaccctnggaacctnaaccc

SEQ ID NO: 16731 - DNA, 505 bp, Arabidopsis thaliana
  unsure at all n locations
  Clone ID: LIB25-011-Q1-E1-A10
nnnnnnnngnaacntctattcctgcncgccancggtccgaaanaatcccggggtccacccacgcgtccgcaagcaataagaagttcgacaatgatgtttcacttgaaataatagcaatgagaacacctggatttagcggagcagatctcgctaacctcttgaatgaggctgctatattggccggaaggcgagcacggacatcgatatcatctaaagagattgatgactccattgatagaatcgttgctggcatggaaggaacagtgatgaccgatggcaagagcaaaagcttggtagcttaccatgaagttggtcatgcagtgtgtggaacattgactccaggacatgatgctgtgcaaaaggtaacgttgataccaagaggccaagcaagaggtctgacttggttcattccatcagatgacccgacactcatctccaagcagcaactctttgcaagaattgttggtgggactcggtggtaaggccgctgaagaaatcatctttg

SEQ ID NO: 16732 - DNA, 451 bp, Arabidopsis thaliana
  unsure at all n locations
  Clone ID: LIB25-011-Q1-E1-A4
naacggcttcgatgcctttcacatcgccgccaaaaacggaaatctacgtgagttgacttgattctcaaaagtctttgtgctcaagaattaccaattttgcatatatatgcngaagatcaactccatttttatctctaattaggttcttgatgtgttaatagaggcaaatccagaactctcatttacatttgattcatccaaaaccacggcgcttcataccgcggcttcacagggtcatggagagattgtttgtttcttgttggataaaggtgtggacttagctgctattgcgagaagcaatggtaaaaccgctttgcactctgcagctaggaacgggcacacggtgattgtgaagaagttgattgaaaagaaggctggtatggttacaagagtcgacaagaaaggtcaaaccgctcttcatatggcggttaaaggacaaaaacactgagat

SEQ ID NO: 16733 - DNA, 60 bp, Arabidopsis thaliana
  unsure at all n locations
  Clone ID: LIB25-011-Q1-E1-A7
accgatcctacatncttagnctcatcacgtttgcagatttaacaattcttgagttcacca

SEQ ID NO: 16734 - DNA, 443 bp, Arabidopsis thaliana
  Clone ID: LIB25-011-Q1-E1-B1
ggtttttgaagtgatgcctagaaaggatgttgtgtcgtataatactatcattgcagggtatgcacagagtggaatgtatgaagatgctttgagaatggttagggagatgggaactactgacttaaagcctgattcttttactttgtctagtgtgcttccgatattttctgagtatgtggatgttattaaggggaaagagattcatgggtatgtgattaggaaagggattgatagtgatgtatatattgggagtagtttggttgatatgtatgcgaaaagtgctcggattgaagactctgaaagagtgttttctcgcttgtattgtccggatggtatctcgtggaactccccttgtagctggggtatgttcaaaatgggtagatacaatgaaggccctgagaattgttcaagcaaatggtgaacccaaaaggttaagccaaggg

SEQ ID NO: 16735 - DNA, 488 bp, Arabidopsis thaliana
  unsure at all n locations
  Clone ID: LIB25-010-Q1-E1-F2
tcntagncggaccgtcntcntaanatcccngggccgccccacgcgtccaacatggaggatgaagaaccaagatggagagagcttgagtgtagcgcattcccaggcgtggttgtaccgcctccaagactagaccatgtggctgtgagcatgccgtgtggtagggtcatcatctttggagggtcgattgcagggcttcactctccttcgcaactgtttctaatagatcctgcagaanagaaaccgtcatggaggatcctgaatgtccccgggaaaccgcctaagttagcttggggacatancacatgcgttgttggaggaactagagtattggtccttggtggtcacactggtgaggaatggatactcaatgaattacatgaactctgcttggctagccggcangactcggatctgtnanagactctttccttcttcatttggtttgtggttttgtnnctgtcacattccaaactcttaccacatntaga

SEQ ID NO: 16736 - DNA, 445 bp, Arabidopsis thaliana
  unsure at all n locations
  Clone ID: LIB25-009-Q1-E1-C1
acnacgtccgaaaaaaaaaagcctctctctctcctctcctatttatacctctctcgatctctctcgccggcgctgcaaatccctaggtttttcaatcacacccaaaacatttgtagagccccaagtactcaatttcgcttattgatagagagagagagagattgagaatcgcgatttgattttatcaatcgatgccgtgaaaatctcgtaatcagattcaaaattgaggatggttagctgctaccgtaatccttgcgtgaagattgagaagaactaattttggtttgtgagcaactttcgaatcagctctgttagatttgatttgaacttttatttgaanatggatcggtgtgacanctcaggatttgtaagcggcggtggaaatgcttaaaaagncctccaactcctaatagagctgtggnttaatctcctaaaccgggaattt

SEQ ID NO: 16737 - DNA, 449 bp, Arabidopsis thaliana
  unsure at all n locations
  Clone ID: LIB25-009-Q1-E1-C3
nnntggaanttctatctgnccgccccggtcataccataacgggtcnagccacgcgtccnaaatcatcttccatggcttctgattcccaacactncaaactgttactacacctgaaaagccattggagaataaggtgagcgaggaagctaagttgatgganaaagagattatttcgtcggattctgcagatgtggtgaatgataaaccggcatcagattcaaacccggtggtcaccaaagaagaggagattgatcaaactcctgctggtgaaccagataaagaatcaccancantggtggaagaggttggagctgttgtgaaagcanaggaatctacagagacagtgaagcatgagaacngtgagaaggganctgaacaaagttggaacttaaagagcaatccttgttaaanaaactgttgcanaanttaaagttnaaactgttgntacc

SEQ ID NO: 16738 - DNA, 499 bp, Arabidopsis thaliana
  unsure at all n locations
  Clone ID: LIB25-009-Q1-E1-C4
gtnnngnanttctcttgntcggcccgggtcagacnacccgggccacccacgcgtccaaagatgatgattttaaatttcccttttcgaatatattcgtttaattgtctctttatataattaacagtttttgttaatgggaatcgcaggtaacgattgagaagaatctctcntttctccactgagagaatcacattctgagagatcagacaagaagaaacaatggtggaaggaggaattgcgaaagcagacaaaacagagttcacagagtgttggagaacaacatggaagacaccttacatcatgcgacttgctctctccgccggaatcggaggtcttctcttcggttacgataccggagtcatttccggagctcttcttttcatcaaagaagattttgatgaagttgataagaaaacatggcttcagtcaactattgttagtatggcagtggctggagccatcgtcggagcaacagtcggaggttggatnaatgataagt

SEQ ID NO: 16739 - DNA, 245 bp, Arabidopsis thaliana
  unsure at all n locations
  Clone ID: LIB25-009-Q1-E1-C7
cacgcgtccgcccacgcntccgcccacgcgtcgggctaactttcgattccttatccacnaaatctagttaattatctatctccctccaccaatgntgacacacagttncatcaggtanacaaaatgatgcaacccaatgcnnaacttttgtccccatccgctaaatttctaccgtcacctatagatccaccgcaananaaccgtagaaccaccgtatgagcacctcngtcattggaannaaactg

SEQ ID NO: 16740 - DNA, 431 bp, Arabidopsis thaliana
  unsure at all n locations
  Clone ID: LIB25-009-Q1-E1-C8
gcttgtttgttttctctcctctaagaaacaatcagtctcataaagtggcaaagatggttgcagaacgatacacagtcgatttgaataagccacttgtgtttcaggttggtcatcttggcgaagaatatcaggaatggattcatcaacctattgtatgcgttgagggtcctcgtttttttcgaaagtgatttttgggagtttttgactcgcacggtttggtgggcaatcccaacaatctggcttccagttgtttgctacgttctttcaatatcggcgagtaagggacttacgtttccccagatcggtttaatagttgcttttggtgtactcacgtggacactgctcgagtacacgcttcatcgcttccttttccacatccaaaccaagagttactggggcaaacactgcacactancctcctcatggatgcc

SEQ ID NO: 16741 - DNA, 505 bp, Arabidopsis thaliana
  unsure at all n locations
  Clone ID: LIB25-009-Q1-E1-D11
nnggngngnntnnnggcaacttnntcgctggtcgtgnccgtcnnnaaattcaagggtccacgnacgcgtccgnnaaaagattgccagagatgttttagataaactgaatgctacaccatctagggattttgatggtatggtgggaattgaagctcatttgagagaaataaaatctttgctagatttagataatgttgaagttaagatagttgcaatcgctggtcctgctgggattggtaagactactattgccagagctttatatggtttactctctaaaaggtttcaacttagttgttttgtggacaaccttaggggaagctatcatagtggttttgatgagtatggttttaagctgcatttacaagaacagtttctttcaaaggttttgaaccaaagtggaatgagaatatgccatttaggtgcaataaaagaaaatctaaccgaccagagagtgctcatcatccctgatgatgttgaacaagtttaagcatttggnggcttt

SEQ ID NO: 16742 - DNA, 441 bp, Arabidopsis thaliana
  unsure at all n locations
  Clone ID: LIB25-009-Q1-E1-D4
ttcttcgaatgttgaagaaaacctaaacccagaaacaaaatccgcagaagaacaaaacccacttgccattttccattcttctctaccaatcgcatctctttctctgaccttgttcccatcctcgactcaatttctcaaattgtttgctcatcatccaaacaaggttaagatccctacgcaggcttcttctctcactcatctctctctttcttctgtctctccttttccttcttccagaatctctttcaaatccaccatcgctgctaaccctcttcaatcccctctctccatcgtccctcgtcgtcccgttgatccttcctccgccgccgctctccgccgtgctgctgtcgtctggttccgcaatgacctccgtgtccacgacaacgagtgtctcaactccgccaacgacgagtgcgtctcccgttttgccgttttaanggg

SEQ ID NO: 16743 - DNA, 441 bp, Arabidopsis thaliana
  unsure at all n locations
  Clone ID: LIB25-009-Q1-E1-D5
aaatcaccattaacgttgctcacacttcttactatttgttttggattcttcgatctcagcagtgctctttatggatcttcgtcacctgtggttcagctcactgcttctaactttaagtccaaggttcttaattcaaatggagttgttttggtagagttctttgcaccatggtgtggtcattgcaaagctctaacacctacatgggagaaagtggctaatattctgaaaggagttgctactgtggctgcaattgatgcagatgctcatcagtctgccgcgcaggattatggtattaaaggtttcccaacaattaaggtttttgttcctggaaaggctccaatcgattaccaaggagcaagagatgccaaatccantgctaantttgcntanaagcagatnaagggtcctttgaatgaacgtttggnagggaaaagttaacca

SEQ ID NO: 16744 - DNA, 498 bp, Arabidopsis thaliana
  unsure at all n locations
  Clone ID: LIB25-009-Q1-E1-D6
tnaactngtcagcgggccagtanacggtcatagngtncccggggncgacccaancgtccaatgagcgcgacgcagacgcagacgcatggaccgcactcgctggccttcagggtgatgcgactctgcaaaccgtctttccacgtcgatcctcccctccgcattgaccctttcgatcttctcgccggcgaggatttctccgacgatccctcttccgcctccttgttccgccgccacgtatcttctgccgacgctgtcgactccgatctcagctaccgaaatagattcctcctcaaccatcctaccgatccaatcggtctctctggtcttctgcttcttcctcagtccttcggagcgatctatctcggagaaacattctgtagctatatcaagcgtcaacaatagttccacttcaagaagttcgggatgttaccattaaggcagaaattcagacagagaggcagaggattctactctggatacatccaagtcacctgttgg

SEQ ID NO: 16745 - DNA, 424 bp, Arabidopsis thaliana
  unsure at all n locations
  Clone ID: LIB25-009-Q1-E1-D9
ggcttcctagagcaaaggagaaaaaaaatggtgaactatgtgctcaaaatcaccgctgatctcgagaatctcactaatctccagccttccggtggctgcgacgattccaacttcccttacctcttcaagttgaaatgtgaaagatgtgganaggtgactccgaaagaaacatgtgtgactttgaatgagacttttactcctccgggaggtaggggtacttgtcatcttgttcagaagtgtaagttctgtggaagggaagggaatgtgactatgattccgggcaaaggtcgacctttaactctggaagattctgaggctggagaacatgcccctcttatggtgtttgactgtcgtggctatgaanccaattgatttcngatttggtggataatgggaaantcaagctgaaactgggaacaaaatt

SEQ ID NO: 16746 - DNA, 503 bp, Arabidopsis thaliana
  unsure at all n locations
  Clone ID: LIB25-009-Q1-E1-E1
gtnnngnaattctattgntcggcccggtcacaacaaacgggtcnnnccacgcgtccganctgttcgtttcttccaaaccctagaaaaatccttagcaatggangatgctgatggacttagcttcgatttcgaaggcggtcttgattccggacctgttcagaacaccgcttccgtcccggttgctccgcctgaaaactcttcctccgccgctgttaacgtagcaccgacctacgatcattcttccgcgacggtggctggagctgggaggggtagaagtttccgtcaaactgtttgtagacactggcttcgaggtctgtgtatgaaaggtgacgcctgtgggtttctccatcagttcgataaagctcgtatgccgatctgccgttttttccggttatacggtgaatgtcgagagcaagattgtgtgtataaacataccaatgaagatatcaaagaatgcaatatgtncaanctgggggtttgtcccaatggncccgaatntccgt

SEQ ID NO: 16747 - DNA, 430 bp, Arabidopsis thaliana
  Clone ID: LIB25-009-Q1-E1-E10
caatttacaaaaggccttaaaaaagcaaagattcttcgctgacttcgttctctctttcgctggcgaagaagattttctagggttttttgtttgattttcgtgaagtcggaaaaattattattattaatcgtgttgagctgtttgatcggtgaagactatggcgtcgtcttcagcttcggcgacggtggctgttgataaagctaccagcgatcttttgttaggtcctgattggactacgaatatggaaatctgcgattctgttaattctcttcactggcaggcgaaagatgtagttaaagctgtgaaaaagaggctgcaacataagagttcgagagttcaactacttgctcttacgcttttggagacgttggtaaagaactgtggagattatttgcaccatcaagttgcagagaaaaacatttaagggaaa

SEQ ID NO: 16748 - DNA, 76 bp, Arabidopsis thaliana
  unsure at all n locations
  Clone ID: LIB25-009-Q1-E1-E4
cagnatntgatctcaccaattttcagctgccacctcagctgaacctactaagatcacaaccccagtgttaccgcna

SEQ ID NO: 16749 - DNA, 419 bp, Arabidopsis thaliana
  unsure at all n locations
  Clone ID: LIB25-009-Q1-E1-E5
aatttcgaaaagtttgttaaaatgaatgcacacatgctcaatctccttgtcatagtcatttttgtagtttctttcgatgtccaagcactcagtcctcactactacgaccatacttgtccacaagccgaccacattgtaaccaatgcagtcaagaaagccatgtcaaacgaccaaactgtccctgctgcgcttttgaggatgcatttccacgactgtttcgtcagaggatgtgatggctcagttctcttagactctaaggggaagaacaaagcagagaaagatggacctcctaacatctcactccatgcattttatgtgattgacaatgcaaagaaggcattagaagaacaatgtcccggtatcgtctcttgcgccggacattcttcacttgcggcaagagatgcntcgctctctcaagg

SEQ ID NO: 16750 - DNA, 69 bp, Arabidopsis thaliana
  unsure at all n locations
  Clone ID: LIB25-009-Q1-E1-E6
tatcangttgggctcctggtgttataatgagaaggtcacaatcgacatanntcggacattcaattaaat

SEQ ID NO: 16751 - DNA, 433 bp, Arabidopsis thaliana
  unsure at all n locations
  Clone ID: LIB25-009-Q1-E1-E7
tccctcctttatcgcaactaaccccaaatcctactcccgccgccgccgtctcttccgctattccggcgccagttaagagcgtagccgttcagcaaccgntcgatggatctccacgcgccgttgctactgataccggaggtattcctgagccacttgcggctgttcccggcgctaagcttcgtcttatgtgcagttttggtggccacatcatgcctcgtccacacgacaaatcgttgacgtactccggcggcgagactcgtattgtggttgttgatcgacgtgcgtcactgtcntcgctccgatctcgtctctctagtatgcttctcaacggncggtcctttactctcaagtaccatgctccctagcgaagatctcgattcactcgtcaccatcactaccgatgaaagatctggagaacatgattgaaggatac

SEQ ID NO: 16752 - DNA, 435 bp, Arabidopsis thaliana
  unsure at all n locations
  Clone ID: LIB25-009-Q1-E1-B9
ctcaccatgagacaccttagctcacctccatggcctctcctccttctcctcctcctctcttctttcacctccggcgaatcctctctgtccgcagaaaaaaacaaattgcacaccggtggtctcagtagacagagttttcctaaaggattcgtgtttggaaccgccacgtcagcttatcaagtcgaaggcgagactcatcaagacggtcgtggcccaagcatttgggatgccttcgtcaagattcctgggaagatcgccaagaatgccacggctgagataacagtggaccagtatcaccgttacaaggaagatgtggatttgatgaagaaactgaacttcgatgcttacagattttccaattcaanggtccaangataatccctgaagggaaattggtaaagtcaactgggaaaaggattgcttaatacaaaaaaa

SEQ ID NO: 16753 - DNA, 496 bp, Arabidopsis thaliana
  unsure at all n locations
  Clone ID: LIB25-008-Q1-E1-H9
nntnnngnaattttacgccngccngtagccgtcnaaaaattcaaagggtcgacgnacgcgtccgaaaaaaaagtcccactagaaaagctcattatgaaagtgaacgaggaaaacaacaagccgacaaagacccatgtcttaatcttcccatttccggcgcaaggtcacatgattcccctcctcgacttcacccaccgccttgctctccgcggcggcgccgccttaaaaataaccgtcctagtcactccaaaaaaccttccttttctctctccgcttctctccgccgtagttaacatcgaaccacttatcctcccttttccctcccacccttcaatcccctccggcgtcgaaaacgtccaagacttacctccttcaggcttccctttaatgatccacgcgcttggtaatctccacgcgccgcttatctcttggattacttctcacccttctcctccagtagccatcgtatctgatttcttccttgggtgggcaaaaa

SEQ ID NO: 16754 - DNA, 449 bp, Arabidopsis thaliana
  unsure at all n locations
  Clone ID: LIB25-009-Q1-E1-A1
gaaacagaggttcctcttgtgtttttgttttgggattaaggaagctatttctgttctcttcgagtttcaggtctagccctaaccctaaaattcagccatgtcttccaagcaaggagggaaattgaagcctttgaagcagcccaagtctggtaagaagtagtacgatgagcacgatatggagttaatgcagaaaaagaaggatgaagagaaggcacttaaagaactcagggccaaggcttcacaaaaaggatcattcggaggctcaggacttaagaaaagtgggaagaaataagactaaatctgcctcaatgtaatcctatatcaccttatatatgtttgtcaatgtaccatgactagtttataagttataaccattaaaatcatgttgcgatgttgtanaaataaatataaatccaaagacntggccccctcaaaaattntgggaattt

SEQ ID NO: 16755 - DNA, 495 bp, Arabidopsis thaliana
  unsure at all n locations
  Clone ID: LIB25-009-Q1-E1-A2
tactttgnccngccccggtcntanataancgggnccaggcncgcgtccgaaatcgacccagcacanctnggaccatcgttatgtggaagttgaagataggagagggaaatgganaagatccttacttgttcagcagcaacaacttcgtcggacgtcaaacatgggagtttgntcccaaagccggcacacctgaggaacgagccgccgtcgaagatgctcgccggaactatttagacaaccgtccccgtgttaaaggttgcagtgatctcttgtggcgaatgcaatttttgaaagaggcgaaattcgagcaagtgatcccgccggtgaagatcnacgacggcgaaggcataacttacanaaacgcgacggatgcgttacggagagcagtttctttctactcggctttgcagtcctccgatggccactggccggcggaaatcaccgggactctcctcttccctcctccantgggnatttggttccanaacanaaggg

SEQ ID NO: 16756 - DNA, 510 bp, Arabidopsis thaliana
  unsure at all n locations
  Clone ID: LIB25-009-Q1-E1-A3
gnnnngnanttctagttcccggccggtcacatcntaanggcccgggcccncgtccnagcagantctctccaatccaccgctacattcctccagtcggcgaagatcgccaccgctccttctcgcggaagttctcacctccgatcgactcaagccgtcggcaaatcttttgggctcgaaacttcctcggctcgcctcacttgctccttccagtctgactttaaggacttcaccggtaaatgctccgacgctgtcaaaatcgccggattcgctcttgccacctctgctctcgtcgtctcgggagcaagtgcngagggagctccaaagagattgacctatgatgagattcagaagcaagacatacatggaagtgaaaggaactgggaacggntaaccagtgccctactattgacggtggctctgagaatttctcgttcaaacccggaaatatgcaagaaagaagttctgctttgaacctaanttcntnaacgttaaanggaaaaaatnttaana

SEQ ID NO: 16757 - DNA, 442 bp, Arabidopsis thaliana
  Clone ID: LIB25-009-Q1-E1-A4
gtatcgaaactgctcggatatttgactttgaggagtttccaagaagagataaggttacatacatgtattataccggccgattagaagtcttcaacgaaaattttcctgctgctgatacaaagctatcatatgccttgcaaaattgcaaccccaaaagagaacgaaatataaggatgatattaaagtatttggtaccggtgaagctttctttaggaattataccaaaagatgagctcctgcgaaattataatctgcatgagtacacaaagattgtgcaagctctgagaaagggtgatctaaggcttctccggcatgctcttcaagaacatgaagatcggttcttgaggtcgggtgtgtatcttgtcttggaaaagctagagctccaagtctaccagagactcatgaagaaaatttatattaaccaaaaactgagtggttcaac

SEQ ID NO: 16758 - DNA, 440 bp, Arabidopsis thaliana
  Clone ID: LIB25-009-Q1-E1-A6
agaaactttgcagccttcactcacagatcagctgctgctcatccttggcatgacttggagattggtccagaagctcctactgttttcaactgtgttgttgaaattagcaaaggtggaaaggttaagtacgagctagacaagaacagtggccttattaaggttgatcgcgttctctactcatccattgtgtacccccacaactacggtttcatccctcgaactatctgtgaagacagtgatccaatggatgtcctggtactgatgcaggagcctgtgctaaccggatcattcctccgtgcccgtgctattggtctaatgcccatgattgatcagggtgagaaagacgacaagatcattgcagtatgtgctgatgatcccgagttccgtcactacagagacatcaaaagagcttccccctcaacgtctaagctgaaatccgt

SEQ ID NO: 16759 - DNA, 508 bp, Arabidopsis thaliana
  unsure at all n locations
  Clone ID: LIB25-009-Q1-E1-A7
gtnnngcaattccactccttctgntcggtcananctnacaggcccnggccnacccacaantccanttccttcagcgcaggatattgctgctgaatttgtgagacagtactatcatgttttaggacagcttcctcatgaagctcgtangttatatgttgatgctagtgttgtcngcagacctgatgttactggtactatgatgtcttttacttccgttgaggctancaanaagcatatcctgtcctgtgactttgagaatactaaatttgaggttctgagtgttgactctcagaattctttggaagatgggatttttattatggtgatcggtttcatgactggaaaanacaaccagaggaggaagttttctcagatgttcnatcttgctcgtcaanataccctcgttgttctcaatgacatgttacnatacgttgatcaagaggattcttctagcactgaaactccatgtgagccggttactganatgtganaccanctggangggcca

SEQ ID NO: 16760 - DNA, 425 bp, Arabidopsis thaliana
  unsure at all n locations
  Clone ID: LIB25-009-Q1-E1-A9
ttagttttagcagagttggtgaaatcaatgggccaccaaaacgccgccgtttcagagaatcaaaaccatgatgacggcgctgcgtcgtcgccgggattcaagctcgtcggattttccaagttcgtaagaaagaatccaaagtctgataaattcaaggttaagcgcttccatcacatcgagttctggtgcggcgacgcaaccaacgtcgctcgtcgcttctcctggggtctggggatgagattctccgccaaatccgatctttccaccggaaacatggttcacgcctcttacctactcacctccggtgacctccgattccttttnacngcnccttantctccgtctctctcggccggaaanatttaacccgaaaccaaaagntncaanccaaatttcnattaanggtctggcgtccctnctccctt

SEQ ID NO: 16761 - DNA, 507 bp, Arabidopsis thaliana
  unsure at all n locations
  Clone ID: LIB25-009-Q1-E1-B1
gnggnaantctatcngcncngnnccggtcacnacnanancgggtcnagccacgcgtccnagaaaattggaagaatgaggaggaggaggtgcgatcttcaaccgaagagaacgagaatgtgcgatcttcaaccgaagagaacgagtatgtgcgatcttccaccgaagctggtaggggagaagatcctcacgaggattccgataacatctctgagagcggtgcgatccacttgcaaattatggaacgctttaaccaaagatcgggttctgggtaaagcagcggcgcagtttttggggtttatgacgatggattcaaaggtctgttcagttagattccatctccgtcgcagcaaggaggaagaagaagacacgatggatctatctataaagcangtagatttgcttaatcaantcgagatatctanaatgtatcactgcgacggcttgttgttatgcntngctaangncaactccaaggtcctggnttggaaccctaanttggggcaana

SEQ ID NO: 16762 - DNA, 487 bp, Arabidopsis thaliana
  unsure at all n locations
  Clone ID: LIB25-009-Q1-E1-B10
cttctacgcagnccgtagccgtcanaaattcnanggtcgacccacncgtccgnctgatgagtatgggctatcttctaaggcataccgatcttgtctcgttgaatcagtggatgaagaattacttaagcgtttgacaaaggtcgcccaattcttgtcttgggaacttggacttgaatctgatgcaaatgcaataatttcaaatggaagggtgatatttcctgtggatgagaggacatttttgggccaagatttacatcttcttgagtcaatggagttcaatcaaagagtaaagcctgttcaagaaattattgaaggcattgaatggcaagatgtggatcccgatctgctgacaagtaaatattttagcgatgtcttcatgtttgtgtcatctgcaatggcaacacgggatcgtagttctgaaagtgcgcggtttgaggtgttgaattcagaatacagtgcggttttgcctgggaaatgaaaatgcaac

SEQ ID NO: 16763 - DNA, 403 bp, Arabidopsis thaliana
  unsure at all n locations
  Clone ID: LIB25-009-Q1-E1-B3
tganttcnntcnttcggtcggtcnnaccntacgggccnagcacgcgtccaaacacacgtccgctcactttctctcttctctctctctctttcttttttgagtccgtgaaggctaagtctgaaagaatgacgaaggatgagttgacggaggaagagtcgntctcgggcaaggactacttagacccaccgcctgtgaagacgttcgaggtgagagagctcaagaagtggtccttctacagagctgtcatcgctgagttcatagctactttgctctttcntacgtgactggttttgagaagtcatcggctttaagagccagacttgatatcaacgccggnggnggaccttgtgcnattgtcggcctcntaggaaccncttgggccttnggnggcatgaanttnacc

SEQ ID NO: 16764 - DNA, 497 bp, Arabidopsis thaliana
  unsure at all n locations
  Clone ID: LIB25-009-Q1-E1-B4
nnnngnaattcnattgntcgcccggtcntagcaaacgggncggccacgcgtccnaagtangctccggaaaaatccagaactcagaccaagtgctgctgagcttcttagacaaccgctgcttcaaccgtatatccagaagattcatttgaaagtgaatgatccaggaagtaatgtgttacctgcgcaatggccagaatctgaatccgccaggagaaacagttttccagaacagagaaggcgtcctgctggcaaaagccatagctttggtccaagcaggtttaggggtaacctagaagattctgtttcttccataaaaaaaactgtgcccgcatatctgaatcgtgaaaggcaagtggacttgtctacagatgcaagcggtgatggaacggttgttcgtagaacttcagaggcttctaagagttctaggtatgtaccagtgagaacttcggctcacctgtgagaactagacagnctaagagtgancttgggcnacttcc

SEQ ID NO: 16765 - DNA, 144 bp, Arabidopsis thaliana
  unsure at all n locations
  Clone ID: LIB25-009-Q1-E1-B7
cagancgataacaggaaacanagatacagtcagtactcantattttgagggcacctacggaaagcaagtantactacanagggtagacgttccattgcttaatgatgaancatcatcantacaagcaaacgtgtttttcatcat

SEQ ID NO: 16766 - DNA, 420 bp, Arabidopsis thaliana
  Clone ID: LIB25-009-Q1-E1-B8
tatggatcattctaagttgattgaagatttcaatgagtcatctttagagtttcagaggaagattcttgaacgttctggtttaggagaagagacttatctccctgaagctttacattgtatccctccgaggcctacgatgatggcggctcgtgaggaatctgagcaggtaatgtttggtgctcttgataagcttttcgagaataccaagattaaccctagggatattggtgtgttggttgtgaattgtagcttgtttaatcctacaccttcgttgtcagctatgattgttaacaagtataagcttagagggaatgttaagagttttaaccttggtggaatggggtgtagtgctggtgttatctctatcgatttagctaaagatatgttgcaagttcataagaatacttatgctgttgtggg

SEQ ID NO: 16767 - DNA, 487 bp, Arabidopsis thaliana
  unsure at all n locations
  Clone ID: LIB25-008-Q1-E1-H4
ancncncgcgnncggcttcgaattcnaagggncgacgnacgcgtccnatccccattaactctgaacacatcaggtttggtttcgtgtttcaactttgagatacttctctagatttcaatcggagagtcttttgttccgccaaagtttcaatttttcaataccccacgacggcaaatagggttcatggaagatcaacccattaaccagtgctcnagtagcaccaatgcgtctgagaaaactccagaatcaacccttgagcttaacatcaaaacgttagactcgcggacgtatactttccaagtgaacaagaatgaaactgttttgctattcaaggagaagattgctatgtgagacangggtgccggttggtcagcagcggctcattttccgaggacgggttttgaaaagatgatnatcctccctcggagtatcatttgggaaaatgggcatactttacacttgattgtgaggcaaccatcaaaatcag

SEQ ID NO: 16768 - DNA, 432 bp, Arabidopsis thaliana
  unsure at all n locations
  Clone ID: LIB25-008-Q1-E1-D7
naaggtcagaanttcccgggncgacccacncgtccgcggacgcgtgggtgagtacacacggatatgcagctcctgaataccttgcaaccggtcatctaacancaaanagtgatgtctanancttcggggttgtccttctggagctgttgtctggtcgtcgagcagtggacangaancgcccatctggagagaggaaccttgtggagtgggctaaaccatacctcgtaaacaaagganagatattccgagtcattgatantcgtcttcaggaccngtactctatggaagaancatgtaaagtggctactctgtctctganatgtctcaccacagagattaagctgagaccaaacatgatcgaggttgtttcgcacctcgaacacnttcagtcttaaatgctgctatagganganattntggataacncagnta

SEQ ID NO: 16769 - DNA, 425 bp, Arabidopsis thaliana
  Clone ID: LIB25-008-Q1-E1-D8
ttcttctactttgtcttccatcttcgccgacgagtcacatctccgaaatccggagccggagagggagaaagaaggagaatttgggttctccgagatcgaagctcttgcctcggaacccttgattttgttttggaataggctatttttttagtaaaagaggaaatggtgggaagtagtaattcgttagcgggtctacaagaccacttgaaattagcgagagaatatgcactagaaggatcctatgacacatctgtcatcttcttcgatggcgccattgctcagatcaacaagcatttaaacacccttgacgatcctttggcccggaccaaatggatgaacgttaaaaaggccataatggaagagacggaagttgtgaagcaattggatgcagagaggagagcatttaaagaagctcccactgggcg

SEQ ID NO: 16770 - DNA, 55 bp, Arabidopsis thaliana
  unsure at all n locations
  Clone ID: LIB25-008-Q1-E1-E10
cacaggattcgcacgattcggaagtgtncatcgccgtcttcgttttactcacttc

SEQ ID NO: 16771 - DNA, 434 bp, Arabidopsis thaliana
  unsure at all n locations
  Clone ID: LIB25-008-Q1-E1-E11
gctctttattcaatctcgtttaaaattaacataatgatgacgccagtgaagaaaagtatcgccattagaccggtgtcgttctacggaaacgggcttcctcgtcctcgtttcttcganaatcctaagttcaatgattaccgtgttgatcctcccctctctgtgctagatcctcttctctcatgggcgagagacgctcactggtcaatgggtggtctcaacttcacgcgtctccgtctccaaggccggatcgaaggaaacgtcaacaagctccgtgcacagcttgagaaatccacccctgtgaaactcgaatctggaaggaagaagaagagatctggttctgagtctcctccttctgctccgattgtggtgaaacgaaggaggtacttagatctgaacgattctgatgatgaggaagtcngatctgaagatgaagg

SEQ ID NO: 16772 - DNA, 454 bp, Arabidopsis thaliana
  unsure at all n locations
  Clone ID: LIB25-008-Q1-E1-E3
gntggnggcaacttctacgcnctngtgccngtcttcaaattcaangggccgacncacgcgtccgncgaaaaccatggattagggtttttcagtttcctctttcaatcgattaacccacagaacaaagtatctcttaccttcgggtttagatattctcttcgtctccgtctatagnatcatttctcaaagtcgacttacgaatttgactcaggagatatttcgtttgtgattttgttaaggctagcttcaattctattcagattaatcaatggattctcagatgctcgtggcgcttggactatcccttgttgggggattaagtacctctttaggtgcgctttttgtgnttcttagtgngaatcccnntatgaagatgcntgganttcnanagggttttgcttcaggtctgatgttgnncatacgttcttggattggcncatactgcnagtganac

SEQ ID NO: 16773 - DNA, 487 bp, Arabidopsis thaliana
  unsure at all n locations
  Clone ID: LIB25-008-Q1-E1-E5
naactggacgccgntcggtnnaggtcnaaganttcccgggncgacccacncgtccngtttgtttcaatagctatgcggatactagtggagctggaaatgatgtttatgagtttgtaagtattaacatagagatgttctttcttcttcttatgctgtttcttaaagatttggagtttattttgtgcaggtaaagtcgattgggaagtttaaggagactaaacgaacagaggggatatcgacatctgatataatcatgagaatagtgaaagattataaccagtatgtgttgcgtaatctggaccgaggttattcaagagaagaactcggtgtcagcttcgttaaggagaagaggcttanagtgaatatgagattgaaagaaacctacaagagaaaagttaaagaacaacangaaaaagatacaaaccgtagcaaaaactgctgggatgcaccatgatgagtggcttgaaaatgctgatcgttggggtgg

SEQ ID NO: 16774 - DNA, 221 bp, Arabidopsis thaliana
  unsure at all n locations
  Clone ID: LIB25-008-Q1-E1-E8
ggncccgggncgactcaancgtccnacataatctcagggnaagctctgttactcctcttttgctttatcttancatgttttcttatcttcagcatcacaagatctggacgaatctcccgcggggccaccgcgctgcctccaggatctccacggttaccgatcatcggaaatattcacctcgtcggaaaagtccacatcgctcattcnncgagcnctcanaa

SEQ ID NO: 16775 - DNA, 496 bp, Arabidopsis thaliana
  unsure at all n locations
  Clone ID: LIB25-008-Q1-E1-F11
nnnnnngnaacttttacgccnctcngtagccgtccnaaaattcnagggtcgacccacncgtccgctttgttaaatttgaagttttcgaacaagttgcaaagaatgcggtgaggggactatgggcacgtcgttcaaatctcgacttggttggtgctcacatcaatgtctttacaggtgaatggacacagaaggtaacaaaaaatggcttctgtatatgtcagaagaactanggtttgatgaactttgcttcaacaaactaattagtctttttttgtcacccaaattctaaaatggtagtgtttacttggcaggatgctggtataggaacaagcattgattccttctatgagtatctactcaaggcttatatactatttggggatgangaatatctatacatttttcaagaagcttatagatctgcaatgcagtaccttcacaangatccttggtaagctttctgtatcttgtatgatanagaaacaagaacaaacaa

SEQ ID NO: 16776 - DNA, 458 bp, Arabidopsis thaliana
  unsure at all n locations
  Clone ID: LIB25-008-Q1-E1-F12
gtnnnggcaacttttacgccgntcngtagccctccaanaattctnaggtcgaccnacccgtccgccaactcacaaaaatggcgattcgtcttcctctgatctgtcttcttggttcattcatggtagtggcgattgcggctgatttaacaccggagcgttattggagcactgctttaccagatactcccattctcaantctctccataatcttttgactttcnattttaccgacgagaaaagtaccaacgtccaagtacgtaaaggcggagtaaacgttaacanccataaaggtaaaatcggtancngaacngccgtgaacgttggaaagggaggtgtacncntggacncaggcaagggcaagcccggaagatggactcacgtttngcgttngcagccggaaaatgtcacggaagtggccgtcgcaatncagaccgggttaanccnggttaaataaccg

SEQ ID NO: 16777 - DNA, 76 bp, Arabidopsis thaliana
  unsure at all n locations
  Clone ID: LIB25-008-Q1-E1-F5
gtgggngtcctgagtaagatctctatccgttcatcgttttctctgtgtnnatgtgcgtggttttgtttcactctgc

SEQ ID NO: 16778 - DNA, 431 bp, Arabidopsis thaliana
  Clone ID: LIB25-008-Q1-E1-F6
aaggcaatggagcttgttccggatgaggagttggaggcttcttcacgaggaggttctggtgcacctgctgatcgaagggctctcaagatagctcggttcaaacgtcaaaaggctgcagaggcaaagcttcttgaaattaaagagaggaaggagcgacgtggacgttccactaaagcatcagctttgtcgactccggttgaatctggagaagatgatattccagatgatgacagcgaagaagagagagaggcctggctctcctcaattaacttggctatttgtaaggctattgatctgttggaaatgctaaagagagaagaggaaatgctctctgcaataaaggaaagacagttgaaggatggagaaggtggattttctcgggatgctcttgatgatcgtacaaagaaagctgaaacctggcacagagacgc

SEQ ID NO: 16779 - DNA, 66 bp, Arabidopsis thaliana
  unsure at all n locations
  Clone ID: LIB25-008-Q1-E1-F7
ngtcccgggncgactcacacgtccggttttttgcaacggaaaaaggaaaaaaaaaaaaaaaaaaag

SEQ ID NO: 16780 - DNA, 502 bp, Arabidopsis thaliana
  unsure at all n locations
  Clone ID: LIB25-008-Q1-E1-G1
gnntgnngnaacttccncgcgtacggtgccggtcnccnaattcaacggggncgacgcacgcgtccnatttaancgggaaaaagttcagtcagtgacactaatgttcgaatcgaacatggttcttcaaacactatcttcttcttctcctccaantcaccgtctctatcttcancattctcagattctcccttcttctgggtcacccagcaagatttctcttcagatacatggaaggactttggccattcgatcttttcatgaaatttctgctacaggtttaccggctttgaacaaagcttccttgaagaagctaccaatcaaaggatctacctttctgctggggcanagcttgttgatggtttctgctcanccacagttgggcancagcancagaaatcataangnctgaaccganttacgaaagtttggngagttaattgaacntagtagtcagctttcctacttgccngttacnactggggttgcttggagtttggtactt

SEQ ID NO: 16781 - DNA, 497 bp, Arabidopsis thaliana
  unsure at all n locations
  Clone ID: LIB25-008-Q1-E1-G2
gntngngnaacttcnangctgntcggtgnccgtcacnnattaaagggncgacgcacgcgtccaacaactnccaaaaatggcgattcgtcttcctctgatctgtcttcttggttcattcatggtagtggcgattgcggctgatttaacaccggagcgttattggagcactgctttaccanacactcccattcccaactctctccataatcttttgactttcgattttaccgacgagaaaagtaccaacgtccaagtaggtaaaggcggagtaaacgttaacacccataaaggtaaaaccggtagcggaaccgccgtgaacgttggaaagggaggtgtacgcgtggacacaggcaagggcaagcccggagganggacacacgtgagcgttggcagcggaaaaggtcacggangtggcgtcgcagtccacacgggtaaacccggtaaaagaaccgacgtacgantcggtaaaggcgtgttacgtgcacacgcgccacang

SEQ ID NO: 16782 - DNA, 504 bp, Arabidopsis thaliana
  unsure at all n locations
  Clone ID: LIB25-008-Q1-E1-G8
ggngtgnngnaacttccacgcgtcacngtgntcntgtnnanggtcacagngtncccgggncgacccaagcgtccntgctgctcctgctctgtttttataagcctccacttcccgccaagcccctcttagccataaacagtgaaaaacccttttgttccttcaccaagctctaagaccctatccatggagacgccgacgatgaagcctgatacggttttgattcttgattacggctcccaatacacacatctcatcactcgccgtattcgttctctcaacgtcttctctctcgttatcagtggaacttcatcgctcaaatcaatcactanctataanccacgagttgttatcctctccggtggtcctcactctgttcacgcgctcgacgcnccgagtttccccgangggtttatcgaatggggcagagtcgaacggtgtttctgtttggggatttgctagggttgcaattgattgtgcanaaanttggtggtgttgttggtggaa

SEQ ID NO: 16783 - DNA, 431 bp, Arabidopsis thaliana
  unsure at all n locations
  Clone ID: LIB25-008-Q1-E1-H11
gntctctantgattcaattgcgtcatagtataatctccatcaacacacagagacgataattctcatagggttaagggaattttgggattgaatgacgttcgttgacgatgatgaagaggaagacttctctgttcctcaatcagcttccaattattatttcgaagatgatgataaanagcctgtttcgtttgctcgtctcccaattcaatggagcgtggaggagaaagttgatggtngtggtttangtttttacttgcgaggaagatctgataacggccttttgcctctgcataagcttgttaaggcttggagatacgatctttcgaacttccagcctgagatttctgttcttacganggataatatatggattaagcttgaggaancgaggaaaagctatggggaattgattanaactgttttggtcacgt

SEQ ID NO: 16784 - DNA, 412 bp, Arabidopsis thaliana
  Clone ID: LIB25-008-Q1-E1-D6
agcggagattctcagtagggttccgttgacatctctaagagcagtgcgattgacttgcaaaaagtggaacgatttatccaaagatcggagctttctcaagaagcaaatcgtcgaaacaaagaagaagcaattggaatcgaaggagattgaggtgatcatgatgaggaattttagggtttatctaacaagcatcgatatccacaacaatgttgatccatcatttacgcctaaaggtacacttattagcttaagcgatgatgcaaaccatcatcaagtcgataatgtatctagagtctttcactgcgatggtttactattatgcatcaccaaagacctccactataggcttgtggtttggaacccttattttggtcaaacaagatggatccaacccagaaattcttaccacaga

SEQ ID NO: 16785 - DNA, 497 bp, Arabidopsis thaliana
  unsure at all n locations
  Clone ID: LIB25-006-Q1-E2-H11
tgggntnnngaatgtcttcctgntntagggtccgtgatcccgggtngcccacgcgtccgaaaaagatggaacctcagagaaaacactcgacagccctccacacgtgtcatccctgccggcgaaccattccatacagaatctacgccgtatttcacacgtgtggcatcatagctctcatgtatcaccatgtacactcaattgtcaacgcaaacaacactctaataacatgtcttcttctcctctccgatattgttctcgccttcatgtgggcaaccacaacttccctccggttaaacccgattcatcggaccgagtaccctgaaaaatatgctgctaaaccggaggactttccaaagctggacgtttttatatgcacggctgatccgtacaaggagcctccgatgatggtggttaacaccgctttatcggtgatggcttacgagtatccgtctcataagatctcaagtgttcgtatcggacgatgggnggntttcctt

SEQ ID NO: 16786 - DNA, 446 bp, Arabidopsis thaliana
  unsure at all n locations
  Clone ID: LIB25-006-Q1-E2-H3
gnnnggagtgtntgtttgncctgccggtccgatataaagggtcgaccnacncgtccggnaaaactctcgtccgagatatatcgactccgcgaccctccactactctgctgatctacacacacacacaaaanaaagaaaaaactcaatcgccancancaatggcgaagctcacacttctcttcttcctttcctttctcatcttctcctcatccatcgctttccaatcagacgagctcctcgttgacgacgacgaatttggtctagaaggagcaaagccccgctccaccgatctttacacatcttcttcttcttcgccacagcagcagcancagactccaactatccggagaagatactcagatcctaccganttgggntcanangtccantttnatcctcgaaacatgccnttcgggtggacccngaattttttcccccggcnggna

SEQ ID NO: 16787 - DNA, 432 bp, Arabidopsis thaliana
  unsure at all n locations
  Clone ID: LIB25-006-Q1-E2-H9
caagaactaagcaatctcttgtaagtcaaaaggcagcacaagcaatcatgttgccaaagttcgatccaacagaccaaaaagcttgtctgtctcttcttgaggatgtgactaccaacgtaaagcagattcaagattctgtcttggaagcaatactttcacgtaatgctcataccgagtatcttagtggtttcctcaacggtcaagctgataagaaaagcttcaagaagaatgtacccgttgtaacctacgaagatattaagccttatatcgatcgtatcgccaatggagagccgtctgatctcatctgtgatcgacccatcagtgtactcttgactagctcaggtacttcaggaggagttccgaagctgattcctttgacaacaagangagttggaacaagaggattcgtttgcttctctcnatagacctcca

SEQ ID NO: 16788 - DNA, 429 bp, Arabidopsis thaliana
  unsure at all n locations
  Clone ID: LIB25-007-Q1-E1-A1
ctcttcctctcttttccgtttatctctttcgcagcttctcaggccgcgaagactttcattttccgtatcgatggtggatctatgccttctattttcccgacgcactaccattggtatagcaccgagttcgccgaagaatctcgaatcgtccatgtttaccacacagtcttccatggtttctccgccgttgttactccagatgaagcagataatctccgtaaccacccagcagttcttgctgttttcgaagaccgacgtcgagagcttcacaccacacgttctcctcaatttcttggnttacaaaaccaaaaaggactatggtcaaaatctgattacggntnagacgtaatcaatgggcgtttttggacaaccggnanttggccgggancgggaggagtttccanattcttaaaccccggtccaaattcc

SEQ ID NO: 16789 - DNA, 423 bp, Arabidopsis thaliana
  unsure at all n locations
  Clone ID: LIB25-007-Q1-E1-A10
tgcttcactgtcttgtcgattctgcttctccaaaaaatttcttctttagttctgagtttttctctgttctgaaaaaccccaaattttgttttttttggccattcaaaatttcagaagaaggcgatacaaaatcgtctttgaattctctttgtttatgatctgttcaagtaaaggaacggtcgtaattgctactagaagctcatttcccagattactaaaccggattcaaaatcgaaatgatgttccgattagtgtcatagctactcgacgatcatcaatgtcggtggaggcgtttccgatgaggttaaaatcatcacagaagaagaggaagatgaacattggttgcggtgtttccccttcttcgccgacgacgacggtggtagatgaggaagtaaccattangcggaaattggcaatgaagaa

SEQ ID NO: 16790 - DNA, 399 bp, Arabidopsis thaliana
  unsure at all n locations
  Clone ID: LIB25-007-Q1-E1-A11
aatattcatctggagaattatcgtctcttttctccattgctatggctctctcaactactccttctcagatgtccgttgcacttccaactagaattgatgggtcgagccgatctatgattaaggttcaaagtataagcttcactgataagtcatggggtcctcctctgctgagactagattcgaaatctagaagcttaggtgtgaaaaaaaggtccacaatatgcatgtcacttcagcaatcaagcaaatccaaagtcttggttactcctctagaacttgaagatcccaaagagactcccttaaacttgtttangcctaangagccttatactgcaactattgtttcggttgagaaaattgttggtccacaaagcanctggagagacttgccacattgtt

SEQ ID NO: 16791 - DNA, 207 bp, Arabidopsis thaliana
  unsure at all n locations
  Clone ID: LIB25-007-Q1-E1-A2
tggacgtactttggccgactacaacatccatgaaggagtctactcttcacttggtcctgcgtcttcgtggtggtttctaaatctcgtctctgttaggcttaagaagttcaatgtttcgtttcatgtaaaactttggtggtttgtgttttggggccttgtngnagccctgntgaatngctgttctagctatgtttccgttcnatntga

SEQ ID NO: 16792 - DNA, 409 bp, Arabidopsis thaliana
  unsure at all n locations
  Clone ID: LIB25-007-Q1-E1-A5
attttctcatagctctattgttcgaaaattctgaaacgaacgttaccactatggacactaagatcggatctatcgacgcgtgtaacccgaccaaccacgatatcggcggtcctccaaacggcggagtctccaccgttcaaaacacaagtccacttcactccaccaccgtcagcccctgcgacgcgactcttggccgttacctagcaagacggttagtcgaaatcggcgtcaccgatgtcttctccgttcctggtgatttcaacctgacgcttctcgatcacctaatcgccgaaccaaacctcaagctgatcggttgctgcaacgagcttaacgccggatacgctgctgacggttacgcnagatntcgccgtgttggtgccttgcgtcgttacgttcaccgtcggtggat

SEQ ID NO: 16793 - DNA, 221 bp, Arabidopsis thaliana
  unsure at all n locations
  Clone ID: LIB25-007-Q1-E1-A7
ntggttaancncgancacggnattgntcagacgggacggtatgtaggagattccgagttacagcttgagagggttaatgtatactacaacgangcgagttgtggaaggtacgttcctcgcgctggttctcaatgggatttggagcccngaaaccaatggacaagtgtcagattctgggnccgttacgggtcaagantctttcgaacggggataaacttcnt

SEQ ID NO: 16794 - DNA, 410 bp, Arabidopsis thaliana
  Clone ID: LIB25-007-Q1-E1-A8
tttcaataaaaaaaatcccctccctctcatatttacctcccgaataaaaccggagggagagaaaaaacataaaaagcaaaaaaaaaggtaaaatcaaaaaggggaaaaatatataacaacaaaaaaaaaaagttagaaaaaatggcagtaggaaaggttgtggtatctgtggcatcactcctcctagtggtgggtgttgccataggagttatcacgttcgttaataaaggaggcggcgccaatggcgacagtaatggtcccataaactctcatcagaaagcggttcagacaatttgccaagtcaaccacagaccaaggttcgtgcgcgaaaacactcgacccagtcaaaagtgatgattcaagcaagcttgtcaaaagccttcctgatggctactaaagacgcgattaca

SEQ ID NO: 16795 - DNA, 426 bp, Arabidopsis thaliana
  unsure at all n locations
  Clone ID: LIB25-007-Q1-E1-A9
ctttttcccttcatactcgtcttcacatctgaattccgacaagatattgcgtctgctctcctctcttccctcattctcgtcttctcattaccaaaaacatcttcttctcgtagctaactcaatccaattccaatctccattcaaatcgagcaccagataattttttctcctaaattctaatataagccctaaaattcaaaattgaaatatctatagaatctccttccgattcagacggataatcgccatcaacagcgtgtgaattcgatcaaaaatctgaactttccacaaagaaattcgaaagctcagatttttcgatttcgaaaattttgaaaactcagttaatgggcggattttcagacatcaacacaacggggccaagtggattttcactcccagaaactggnagagagatataaagctggg

SEQ ID NO: 16796 - DNA, 68 bp, Arabidopsis thaliana
  unsure at all n locations
  Clone ID: LIB25-007-Q1-E1-B11
ggggagatcagaaggagggaagaaatagccggtgattgtgttactctgcgttgcancagtantgcctg

SEQ ID NO: 16797 - DNA, 417 bp, Arabidopsis thaliana
  unsure at all n locations
  Clone ID: LIB25-007-Q1-E1-B4
ngataagaatcaatggccaaggaattagcagagaaagctaaagaagcttttctagatgatgacttcgatgttgctgttgacttatactccaaagccattgacttggatcccaattgcgccgccttcttcgccgatcgtgctcaggccaacatcaaaatcgataacttcactgaagctgttgtagatgcgaacaaagccattgagttggagccaacgttggcaaaagcctatctcagaaagggcactgcttgtatgaagctagaagaatatagtactgctaaagcagccctggaaaagggagcttctgttgcaccgaatgaaccaaagtttaagaagatgatagatgaatgcgatcttcgtattgcagaagaagagaaagatttggttcaaccgatgccaccgagtttgccctcaagg

SEQ ID NO: 16798 - DNA, 418 bp, Arabidopsis thaliana
  Clone ID: LIB25-007-Q1-E1-B7
aataacatcccttgtgatcaaacaagtaaaccattcaaaagatgaaaggaagaattttgattttgagtttgctcataatgagtctggtcatggcacaagttcaagtagaagcaaagatctgctgcccttccaaccaagctagaaatggctatagtgtatgccgtataaggttttccaagggaaggtgtatgcaagtgagtggatgccaaaactctgatacatgccctcgaggttgggtaaacgccattctcgaaaactcagctgatgctaccaatgagcactgcaagttagggtgtgaaacttctgtgtgtggtgccatgaacactctccagaactctgatgcaagtgaaattgtgaatggagcgtcggaacaatgtgccaagggatgttctattttctgtaccaagagtatgtagtc

SEQ ID NO: 16799 - DNA, 499 bp, Arabidopsis thaliana
  unsure at all n locations
  Clone ID: LIB25-007-Q1-E1-B8
nnnnnntgtgngnnnnntngnagcattttttangccgnccggtancgnancnnagaattcgcnggncgacccacgcgtccgagtgattcatatcaagcaacaggatgttacaatcttctatgttcgggatttatccaaacaaataacaagattgccattggagcagccatatctcctctttctacgttcaaaggaaaccagtttgatatcacaatactcatttggaaggatccgaaaatggggaattggtggatgggtttaggggatagcacactagtcgggtattggccagccgagctattcacgcacttggccgaccacgcgactaccgtggaatggggcggtgaagtcgtcaacacacgtgcttcaggcaggcacacgacgacccaaatgggctctggtcattttccagacgaagggtttgggaaagcaagttattttcggaatttggaagttgtggattccggacaacagtctcgtaccggttcatgatgtcang

SEQ ID NO: 16800 - DNA, 418 bp, Arabidopsis thaliana
  unsure at all n locations
  Clone ID: LIB25-007-Q1-E1-B9
aaaacaaaaatatcacagatccaaaagatcggattaacataatctctccaaataatcatgcgttactctcatactctccagcagttctcaattctatctttcttcgttacaatatggaccgttcaatcagtaccaccacaaccaccgattcgatgcgaccaaaccggctgcaccgtctccaacgcgtacggcacgtggcctgaccgcaaaacctgtcacgcggctaacgtcacatacccaacgacggaggaagaccttcgtaaagccgttgcttacgcggctgagcacaatctcaaagtcaaaaccgtcaccaaattctctcacaccataccgaaactcgcttgtccttcangttcagacgcattgctaattantactcgaaatataattcggttatcgagattgaaccggaactgtt

SEQ ID NO: 16801 - DNA, 454 bp, Arabidopsis thaliana
  unsure at all n locations
  Clone ID: LIB25-006-Q1-E2-H1
tcttgggttagaaagacaagaaagtgagagagtttgggctgagagagtcaccgaccatgatgtggtagttggtgttttagacactggtatctggcctgagagtgagagcttcaacgatacaggtatgtcccctgttcctgctacttggagaggagcttgtgaaactggaaaaagattcttgaaacgtaactgcaatagaaagatcgttggtgctagagttttctatagaggctatgaagctgcaacgggaaagatcgatgaagagcttgaatataagtcaccgagagacagagatggtcacgggacacacactgcaactactgtacctgggctcacctgtttaaaggagctaatccttttgggntttccttatgggacaactcganggatggtcaaaaagctaaaatttccgccttanaaaantccgttnggtccgaaggtgttcaattcaaaa

SEQ ID NO: 16802 - DNA, 84 bp, Arabidopsis thaliana
  unsure at all n locations
  Clone ID: LIB25-006-Q1-E2-E3
cgctcctggagtgactcccaaaggtattcccgntttaactgtttttgataaaacgccccttggggaaatntaattgcaaggcnc

SEQ ID NO: 16803 - DNA, 96 bp, Arabidopsis thaliana
  unsure at all n locations
  Clone ID: LIB25-006-Q1-E2-E5
gacattangggacacatacccagcattcnaatgcgttaaaacggtnggagaagaacaaagttgaaatcccaggaactcaaattttggngcccatac

SEQ ID NO: 16804 - DNA, 462 bp, Arabidopsis thaliana
  unsure at all n locations
  Clone ID: LIB25-006-Q1-E2-E6
atagccaacggatccgccatgactgctcgtaagagaactccttcagtgtccaattcggagaaactagctctacctgaacctgcatcttccccgacggttcagaagacctctgtttccggagaggatttccagctcgcgccgccgaaattgggcgtgattttcgtgatctcttcgcttctgtgttcgctttatctttaccttctctgtttccactacaatgttgacaatgagctcaagcgtccgatcctcattaacgctgggcttagcttggttggattctttgtcacactcaagttgattcctgtagctgctagatacgttctgatgcgtaatatgtttggttttgatatcaacaaaaagangnactcctcaagggagaaatttagagtgcctgaatcaattgggaaatgttgtccggtantgtccttctgatantgggcgaatggtatttcaanttcctta

SEQ ID NO: 16805 - DNA, 53 bp, Arabidopsis thaliana
  unsure at all n locations
  Clone ID: LIB25-006-Q1-E2-E8
atggggtacancggctcacattaccgctgcaccncagggttcactcaagggaa

SEQ ID NO: 16806 - DNA, 439 bp, Arabidopsis thaliana
  unsure at all n locations
  Clone ID: LIB25-006-Q1-E2-E9
aaaatnaaaacgacgatggagganttccaatctcctagaatacgatcttacaaatcgtatgaaggagataggaacctccaactggttaatcctgcanatttaaaactggtcagagggatatatgttgttagagaatcgaggcgcaatcgatctccgataaaancagatatatggcgcaagatgtcttacaaagacatgcccgttagaccganaagatcttcttctcattcgacattgttcaaaggatggtggaacgatccggagataaagagaaagagacgagtggcgaaatacanactctattcagccgaagggaagtgaagatnactttgagaaagagttacanatggattaanatccaatgctcgnngatcattcatggnatataagtctctcnatctcnactctgttttaactgtttanaagnttgntttgaaaa

SEQ ID NO: 16807 - DNA, 431 bp, Arabidopsis thaliana
  unsure at all n locations
  Clone ID: LIB25-006-Q1-E2-F11
attcgaggagtttccatggtggaacagaaaccctagagcctttatgctgccactaattatcactcttcactattgaattggggatggactcagagaaaatcctcaatccaagacttgtttcgattaatagcaccagccgcaaaggtatgtccgttgagttgccgcagaaaccgccgccaccgccgtcgttgttagaccggtttaaagctttgcttaatcagcgtgaagatgagttcggtggtggtgaagaggttttgcctccgagtatggatgagattgttcagctttatgaggttgttttgggtgagcttactttcaattctaagcctattatcactgatctcactattatcgctggtgaacaacgggaacatggtgaaggaatcgctaatgctatttgcactcgaatccttgangctcctgttgaacaa

SEQ ID NO: 16808 - DNA, 457 bp, Arabidopsis thaliana
  unsure at all n locations
  Clone ID: LIB25-006-Q1-E2-F3
attcccaacttgtggctatgcagctataaacacatcaagtcctttgtcaataagacaaactctgagttctcctggtggattttatgagttaggcttcttcagtcctaataatacncagaatcagtatgtcgggatctggttcaagaagattgttcctcgtgtagttgtgtgggtggctaacagagatacgccagttactagctctgcagcanatctcactatcagcagcaatgggagcctgatcttgcttgatgggaaacaagatgttatttggtcaacangaaaagctttcacatccaacaaatgtcatgcggagctcttagataccggaaattttgttgtaattgatgatgtttcaaggaataagtttatggcaaaacttcgaacatcntggnaatacaatgctgcctcnagtcntcantgatgtangatacctctaatngcangaagcntttgt

SEQ ID NO: 16809 - DNA, 450 bp, Arabidopsis thaliana
  unsure at all n locations
  Clone ID: LIB25-006-Q1-E2-F5
cgtccggtcgaggacatcaaggctaaggtcgaagctgcaaacaaggcagtgtcgaagatcggagaacacatgtctaagggatctggatcatctggttccgatggaagctctggtgagggtacaagtgggactgagcagacgcctgaagctgaattcgaggaggccagtggttcaaggaagtgaggttgccgctaaccggttccatacagaaatcaggtttttcccaaaataagtttacatgcttatctcctccctcacaaatttgattagttttgtgtatttaaaaccttatttgagaggtatcatctcttcgaaacctattgagagtcccggatgtantttgtttgattggtattttcatgaagtttacggttattatccttgaccggttaaatgagtcaatttcacataaannaaaaaaaaaaagggcggcgctctaaangatcaang

SEQ ID NO: 16810 - DNA, 466 bp, Arabidopsis thaliana
  unsure at all n locations
  Clone ID: LIB25-006-Q1-E2-F6
gagacgatgccgacggattcgaaaatggccaagtttcttcaatcctatggatatgatttgattctgggatctgtagctgcaatctatgtggtcatggcaccatatactaaggtggaagagagcttcaacgttcagtcaatgcacgacattctttaccatcgccatcatttggactcttatgatcatttggagttccccggtgttgtccctcgaacttttattggagccttcatagtctctgtttttgcatcacctgttgtatcaattatcaagctgccttggnttccccaaggtttatacccttgttgcacctcgtttgggtgttgggctgcatcatattgtccacactaagatttntcccggattcagatnanaaaaanngtttgggaaatccaagtgggaaactttccttgnaacttttcancaagtcngcaagnttcaatttccttttcannngcactcngtc

SEQ ID NO: 16811 - DNA, 380 bp, Arabidopsis thaliana
  unsure at all n locations
  Clone ID: LIB25-006-Q1-E2-F7
aagtgtctgtntgnccgncctaccganacganattcccggntngncccacgcgtcagaanagaagaaaaacacaaaaaaaaataaaacctttctatttctcttcctcctttgagctttgacctctcctccatctcccccacccttttatgcaacaatgggaaattgttgctctcacggacgggactcagccgataacggagacgcattggaaaacggancttccgcttcaaatgctgccaattcgactggtccaaccgcggaagcttctgtaccanaatcaaaacatgcacctccttctcctcntcatgcanccanncaaggcctaatnggccctgtcataagtcgacccatggaanatgttaaaagcttcanattctta

SEQ ID NO: 16812 - DNA, 411 bp, Arabidopsis thaliana
  Clone ID: LIB25-006-Q1-E2-F9
aagtcggaatttttccgagaaaattcaaaagggcgaaaaaaagagcttttgcgtacagttttcgaattggtctccttcgtacgggcaagctatggttcaagagaactatgaatgaaactgtggtgtaagagaatatcaatggttgttatctgctataatgttttttggaccaagtgagtttgatgctgatgaaatgggttatgcaatgagtagacttgagatagaatccgatctatgtgatactggaaaagacgtttgtggagttggtagtagtagtggtagtcacagatcaagtgaacatttggctgatctagaccatgaaatcagccaggttactaaattgaaatctaatcctcatcaacggtataaccgtgaagtccctgggagacatcagttacctgtgtctactgg

SEQ ID NO: 16813 - DNA, 449 bp, Arabidopsis thaliana
  unsure at all n locations
  Clone ID: LIB25-006-Q1-E2-G1
tcacattttgtaacaataatacaattatacattaaaactctccgacgatgcctcaggcaccgatgccagagttctctagctcggtgaagctcaagtacgtgaaacttggttaccaatatttggttaaccatttcttgagttttcttttgatcccgatcatggctattgtcgccgttgagcttcttcggatgggtcctgaagagatccttaatgtttggaattcactccagtttgacctagttcaggttctatgttcttccttctttgtcatcttcatctccactgtttacttcatgtccaagccacgcaacatctacctccgttgactaatcctgttacaaaccaactgtcacgtgtcctgtcccctcgcaaanttcaagggaaaacccccgttttattcccaaggncaagcctaanancgtcnagttcaaaatgagatccttgaccgt

SEQ ID NO: 16814 - DNA, 434 bp, Arabidopsis thaliana
  unsure at all n locations
  Clone ID: LIB25-006-Q1-E2-G10
aaagaaggatgagtatgttgtcagggaaagctgcttacgatctctttgtctatggcagtctccaggaacccgaagtcgtatacgtgcttcttaatcgcgtccctgaccatgtctccgccgtactctccggctttcacaggtttagactcaaaggccgtgtctatccaacaattctaccggacggtaccggaaaagtcaacggaaaggtgctaaagggcataacagatgatgaactgaagatgttagatgagtttgaagatgttgaatatgacagaaagactgttgaagtaatgctgacggatacttcagagaagctgcaagtcgaaacatatgtatggaagaacaaagatgatccggatctttatggagaatgggatttcgangaatgggngacaacatgacaaggaagatttcgttacagcgaccaagaagtt

SEQ ID NO: 16815 - DNA, 434 bp, Arabidopsis thaliana
  unsure at all n locations
  Clone ID: LIB25-006-Q1-E2-G11
aaatgatatgttaaagaagggtgttgatgaaggaagatggtccgagaagtttgtttccagaatcgagtttaaaggggacatggttgtggcgactccagatatcttccaagtacctctgacatctgatgtggaattcattattttagcttctgatggattatgggactacatgaagagctcagatgtggttagttatgttagggatcagctccggaaacatgggaatgtgcagcttgcttgtgaatctcttgcgcaagtagctttggaccggcgatctcaggacaacattagcatcattattgctgatctangaagaacagagtggaagaatctccccgcgcagcgacaaaacgtaatggttgaactggttcaggctgcaacgactatcggtttagttactgttggcatatggatgtcttcacatctatcttaag

SEQ ID NO: 16816 - DNA, 507 bp, Arabidopsis thaliana
  unsure at all n locations
  Clone ID: LIB25-006-Q1-E2-G6
atgtntgtntgnccgnccgtccgatatananggtngaccgacccgtccgccnaagcgnccgatctctctctctctcnttctcttccatctgacctgtgatgtgagtttgcagatattcatacaactcaatcctcattccctttgtttcgcctctctggatttcgangagctgagagattatggtttctcgattttcgagattaggagtctaatccccaccaccagcatagctganatcctggaggagagaatgacggattcgggtctaatgatgccggcggagattgctggaattctaaccacggcgattacgagttggtgggatgatgtnaatgaggtcaactcagtggcaagatgggatcttttcgctcttgtggtgcttatgctcttgtttncgccnttgctcttgttcaagngntangggttcaaaatgagaatgcctgagtaatggttggaccantcangaagngttcaaacttatgaactttgtcngtcaatggnanttct

SEQ ID NO: 16817 - DNA, 423 bp, Arabidopsis thaliana
  unsure at all n locations
  Clone ID: LIB25-006-Q1-E2-G9
ttttagcagtgaagtttgcgaaaatggcgtcttcggtttttctatccagtttctcgtcatcgtcttctttgcaactctgctcttcctttcacggcgagtacttagctccgtcgagatgctttctcggagctccggtcacttcctcttctttatcactctccggtaagaagaactcatattctccgagacagttccatgtttctgccaagaaagtttctgggttagaggaagccattagaatcagaaaaatgagagagcttgaaactaaatcaaaagttaggagaaatccaccattaagacgtggaagagtatcgcctcgtcttcttgtacctgatcacattccaaggnctccttaagttgagtctggtgtattaccggatatatcaagtgagttccaaattcctgggtcctgaaggnaatggg

SEQ ID NO: 16818 - DNA, 531 bp, Arabidopsis thaliana
  unsure at all n locations
  Clone ID: LIB25-006-Q1-E2-E2
gnnnnggaantgtttcttagnccgcccggtccgaaataacgggtcgacncacgcgtccggttctgttctttttatttttttaaagaatggcttcaatttctgcaactttgccttcgccattgttactcacacagagaaaatccaatctcacatcgattcaaaaactcccattttctctaactcgaggtacgaatgatctttctccattatctcttactcgaaaccctagcagcatcagtctgatggtgaaagctagtggagaaagctcagattcatcgactgatctcgacgttgttagtacgattcagaatgtttgggataagtctgaagataggttaggtcttattggtttgggttttgctggtattgtanctctttgggcatcattgaatctcatcacggnaatcgacaaattgcccgttatcctcgagcgggattccgaactanttggnaaccttgttccccaacggtaagtaataaaggcttggnatcaacctcaataagtataaaatggttaaggttccttgattc

SEQ ID NO: 16819 - DNA, 456 bp, Arabidopsis thaliana
  unsure at all n locations
  Clone ID: LIB25-006-Q1-E2-B8
ttcgaaaccctantcgatttcgagatncaaccaactctgctccttanctcagcttgttgaatttgcgaagtatgggagacgctagagacaacgaagcctacgaggaggagctcttggactatgaagaagaagacganaaggtcccagattctggnaacaaagttaacggtgaagccgtgaaaaaagggtacgtgggaatacacagttctggattcagagacttccttttaaaaccggagcttctcagagctattgttgactctgngatttgagcatccatctgaagtgcaacatgaatgtatccctcaagctatcttgggcatggatgtcatctgccaagcaaagtctggtaaggggaagactgctgtgtttgtcctgtctactctacaacagattgaaacatctcntggccaggtttcngcacntgtcctgttgcatacnaaagaactancttaa

SEQ ID NO: 16820 - DNA, 460 bp, Arabidopsis thaliana
  Clone ID: LIB25-006-Q1-E2-C1
aaaacaaaactaaacaagaaacagaggagaaaaaaaggaaacgacgaggaaaaacaaaaacaaaataaaaacaagcctcgttcttcccttttctctcttcaaatcttttcttttacatattttcttttcttttttttgtctttaatacaaatttactaactaatcagaataaaaatgggttcgagtaagtttaaacgagccataggagccgtaaaggaccaaaccagcgtcggtctagccaaagtcaatggtcgaagcgcttctttatctgaacttgacgtagccatcgtcaaagccactcgtcacgaagagtttccagcagaagagaaatacattagagagattcttagcctaacttcttactcacgcagttacatcaacgcttgcgttagcacgccttcgagacgccttaataaaaccaaatgctgggaccgttgccctcaaaaaccttgatttgatc

SEQ ID NO: 16821 - DNA, 76 bp, Arabidopsis thaliana
  unsure at all n locations
  Clone ID: LIB25-006-Q1-E2-C10
tgggtgactctgctccttcttttgagtcngatcgaactgctaantcttttgctnaacggcatgggttnggaataag

SEQ ID NO: 16822 - DNA, 418 bp, Arabidopsis thaliana
  unsure at all n locations
  Clone ID: LIB25-006-Q1-E2-C11
ggctcataccattacggaaagatcaacattacccgtagcatcaagcttgtcaactctaaaagtgtggttgacggtaaagtccggtttggtttcaatggtgtatcacacgttgacaccgagactcctttgaagcttgctgagtacttccaaatgtcagagaaggttttcaagtacaatgtgatcaaggacgagcctgcagccaaaatcacagcattgactgtacaacctaatgttctcaacatcactttccgtacctttgtagagatcattttcgagaaccacgagaagaccatgcagtcatttcatttggatggctactccttcttcgctgtcgcttctgagccagggangtggacacctganaagagagagaactacaacttgctcgatgcggttagcagacacaccgtgcaagtct

SEQ ID NO: 16823 - DNA, 88 bp, Arabidopsis thaliana
  unsure at all n locations
  Clone ID: LIB25-006-Q1-E2-C2
ttaaaaggnaacaagccccctggngtacattagggaattccgaaaattgaanaacttttggggattttccggaaaccggnaaggaagg

SEQ ID NO: 16824 - DNA, 506 bp, Arabidopsis thaliana
  unsure at all n locations
  Clone ID: LIB25-006-Q1-E2-C5
tgttgcctgcctaccggaccgaattccgggtcgacccacgcgtccgctgacctccaaggaaaagatggaaaactgttgagcctacaaccaacctctgcagatgtagtctataaagaggtaaacgatagtgagctttcgagtccaagttcagacaacctggaagatgcccctccaagtatttctttggtcaagaaacagtttgcgggtagatatgctatatcatctgaggagttcacaagtgacttggttggtgctaaatcaagaaatatcgggtatctgaaaggaaaagttccttcttgggttggtatcccaacttcagttgcgttgccatttggtgtttttgagaaggttatctccgaaaaggcgaatcangcggtgaacgataaattgctagtattgaagaaaactcttgatgaagganaacaangtgctctgaaggaaatccggcanacactgttggggctagttgcacccccagaactgggttgaanaactgaaaagtncta

SEQ ID NO: 16825 - DNA, 378 bp, Arabidopsis thaliana
  unsure at all n locations
  Clone ID: LIB25-006-Q1-E2-C7
gcagagacagagaagatgggcatggcaatgaagtcagtttctaacttcgcaatctttttaatcctctttttggtcacctctgaaatatctgagatagaagcgaaagataaggaatgtctaaaaggatacattgatgcgcctttaagctattgtatggctangatttanccgtcgttgtgttatcgaaattgtcgtttttacaanggcgcnaaangtggaaaatgcgacggtcntaagtgcttctgcgacttctgcaacgacaagnctttttantccgtttctgatgagaaatgtttgaatcctggcatgtnnnaatggnttgtgtaatgatttaaaggtaacgaancaagttaaantcanntaagttnaataaaaant

SEQ ID NO: 16826 - DNA, 448 bp, Arabidopsis thaliana
  unsure at all n locations
  Clone ID: LIB25-006-Q1-E2-D1
aactcttccccaaaaatttgcaaattcaacgactcgtctcggcgatgatggaacgaacctacggccgccgtaagccggggattccgaggaccctatcggactctctaaacgactctgtttctcagactgagtatctctcttcctcttcgtcgccggacatcgagcccattgattactctctccttcctttctccagtcaagagtcttcctctctctggcattcttcttccaggtcaaatttcagagaggattatccacagaacggaggtgttgtacggagggcgaaaagagtcaggaacggtgctgaagctgctgcttttactttcactttgcttgaggctcaagaatttggtgaactgatggancatgaagatgaagttaacttgcgcctgatgggttnangaaaaggacaccaactcaagggttagaaganctancntgtcctctc

SEQ ID NO: 16827 - DNA, 435 bp, Arabidopsis thaliana
  Clone ID: LIB25-006-Q1-E2-D11
tgatgtgcacaagagcattaaatataatgtttgggctagcacaccaaatggaaacaagaagcttgctgcagcataccaggaagctcaacagaaagctggcggctgtcccatctttctgtttttctcggtcaatgcaagtggacaatttgttggtcttgctgaaatgacaggaccagttgatttcaacacaaatgtggagtactggcagcaagataagtggaccggctctttccccctcaagtggcatattgtgaaggatgtgccaaacagtttactgaagcatattactttagagaacaatgagaacaaacctgttaccaacagcagagacacacaagaggttaagttggagcaaggtttgaagattgtgaaaattttcaaggagcatagcagcaagacttgcattttggatgatttctcattctacgaagttcg

SEQ ID NO: 16828 - DNA, 434 bp, Arabidopsis thaliana
  unsure at all n locations
  Clone ID: LIB25-006-Q1-E2-D12
nagtgcgaatgaaccagctatgaaaagcttgaaatccaatccttcaggaccgataccgaactttttcgtatcgctctcttcggcatttacgcaaacacctcttgtgcgttcgaacaaacccaatttgcttcttctaccaccagttgcagactccgtcaaattgattcaagactttcatcagtctctgatttctgctactgagaaatttaaaggattcctccattcgctcgcctctaagaaccctctctttcaggaagcggttcgcctatcttccgaatttcacattttgtgcgacgaagattcgtttgagaaacactacaaagggtgagggttgcgatgtctaatcacgggatttgcagcgggttctgcctggagattcaattgcangatttggtggttgctaatgggttgattaaattcctcaancatatata

SEQ ID NO: 16829 - DNA, 449 bp, Arabidopsis thaliana
  unsure at all n locations
  Clone ID: LIB25-006-Q1-E2-D4
aaatnactctcggtatctcctcttgagtggagcgaatatccanaaangttccgagtttcttncatccttcacgagcttatactttttcttctccattcgtntgtttttaacgatnnncnacaacggcgaaggtattggaaataagacagaagctgttagctctgtttctccatggtgtcaagatcttgtgctaattttctagacttatcatcttgggaccttttanattttcctcaaactccacgaactcttccacgcgtcatgactgttccgggaatcatcaccgacgtagacngtgatacaacctccgaagtaacttctacctccgggtggttcacgtgagangaagatnantgtngctaaacatgttaccactccaaatctaaanganatgcatnanccgggtaaaatggtgttttaacctgggaccnaagactctctncaagttt

SEQ ID NO: 16830 - DNA, 445 bp, Arabidopsis thaliana
  unsure at all n locations
  Clone ID: LIB25-006-Q1-E2-D5
gaaagcaggaaagaagcatatcaactttgttaaatcttgcctagcatttagcgaagtgaccatcccatctatttcatctcccacgaaacacttaaatctttatcttgaaactgctgaggttgcacttttaggtggtttgatttctcattcagatgaactggtcatgtcagctgttgagtatctagagaatgtagtgctgacagatggtttaaaatcaattgatatagatagtatggcctcggttatatgcaaattgtgcagcctcttggtaatgatcccaggtaatcccgagaaaggcgtgatggagatccttaaaagtatcttctctgctactcgctctagttcatgggcaacactgagagtaaaggtgaagattttctgtgctataatgtcactgttgtcgacactttctcangacaatctgccttaacaatctgccaatcca

SEQ ID NO: 16831 - DNA, 471 bp, Arabidopsis thaliana
  unsure at all n locations
  Clone ID: LIB25-006-Q1-E2-D6
atcattgtactcctcctcactgttgacgccatagagggagttgatgtgatggttcgaggagcgaagagatcaatggtggatgagctggaagcaatgttagatgtggtagacccgcaaccgcaggggaaatcattgtcgatgagaagaagaacatttgatatgccagacagtttgatccgcaaagaaatcgcagagggagtgactcagattgtgcagatgcttgaaacggaagaagaatgatggaatggagcactgtgtgtttgtgactcangggctgtttttgttgttgtttgtgactgggaaagaactgatnagcctctttaagtttgattaagtgttccgaatgtttccaattatgcaagacaaaatttaataatgaaaatggcttgaaagaaagagattggggtccccgcctcgcatcnattctcaacctcctcaaaatccttgtcccctccttaagtccgggttccg

SEQ ID NO: 16832 - DNA, 440 bp, Arabidopsis thaliana
  unsure at all n locations
  Clone ID: LIB25-006-Q1-E2-D9
tctacacctctcctcagtctcatactcaaatcaataatccaaaccccaaaaaaaagaaaaccagagaagagagtttaaaaaatgagaggttcttgcaaagtctctatagttcttcttctggttttaatcaatggtgtgcttggagataacccttatagattcttcacctggaaaattacttatggcgacatttatccccttggtgttaaacaacagggaatattgataaatgggcagtttcctggacctcacattgacgcaatcacaaatgataatatcattatcagtgttttcaattacttgaaagagccttttctcatttcttggaacggagtgcaacagaggaagaactcatggcaagatggagtcgtagggacaacatgtccgattccaccaggcaaaaacttcacttatgtaattcaagtcaaagatnaaattgg

SEQ ID NO: 16833 - DNA, 490 bp, Arabidopsis thaliana
  unsure at all n locations
  Clone ID: LIB25-006-Q1-E2-E11
ngcgttacgtaggcctccggaattcccaangtcgacccacgcgtccgcattgacacgatcattaccaagcattggctccaactacgaagcttgggcggttgatttctcctcattcgtggtcgactcgagagactctctctcggtccaaaggttcgagaagtcccttaagaagatgaagcccgagacagctcttgccttagctaagatagtgtttggtagcgacgagagagagattttgggacaagtgtcagtgccttgccatgtcatacaaccaggaaacgacgtcgtagtgcctgtctccgtcgcatacttcatgcaggagaagattaaggggaaatcgacagtggagatcatcgaggacgcgatcgggcattttccacagatgacatcacatttggagctgcttggcgtcatgaggcgcctccttgagttttaaggcttatataaagagctttgcgtcgtttgatcgagtttcctcntgtctanaaaa

SEQ ID NO: 16834 - DNA, 526 bp, Arabidopsis thaliana
  unsure at all n locations
  Clone ID: LIB25-006-Q1-E2-B7
gnnngnngaantgtttccttgccctgccgtaccggaacggaaattctcgggtcgacccacgcgtcngggacgaaaacactcaagcttgcagagatctttcactttaatccttgagaagtagcaaaaatggctgaaaaggcggtcaccatccganccaggaaattcatgaccaacagacttctctccaggaagcagttcgttattgatgttcttcaccctggaagagccactgtttcaaaggctgagctgaangagaagctagcaaggatgtacgaggtcaaggatccanatgcaatcttcgtantcaaattcagaacccactttggangtggtaaatcatccgggtttggtttgatctatgatactgttganagcgctnagaagtttgancccaaatacagacttatcaggaatggacttgncactangattgacaaantcaaggaancannttatngaaaggataacagggcgaagaanatccgttggtgttagaagacaaggctggtgattnccaggaagaact

SEQ ID NO: 16835 - DNA, 448 bp, Arabidopsis thaliana
  unsure at all n locations
  Clone ID: LIB25-006-Q1-E1-C5
agctacggtcagcttttctctagcgtcggggcctcgatctcttgatttgagcttttcttangtctgtctctctctgtacactctctccgccgtcgtatctcgccgtcgatttcaatttttccgacgatatgaagctcaccgttaaaactctcaagggcagtcattttgaaattagggttttaccctccgatacgataatggcggtgaagaagaatgggggaagattcacaaggaaaagacaattatccatgtgggcagcaattgttgatgggacaatggaaaagttttgaaagatgaaactancctggtggagaacaaagttacggaggaaggattctcgtccgttatgcctaacaaagagggaatctggangttcaactgggtcangcttcggttcaaacttcctctgtttcacaacctgtttccgctaacacatcttcgactaagc

SEQ ID NO: 16836 - DNA, 448 bp, Arabidopsis thaliana
  unsure at all n locations
  Clone ID: LIB25-006-Q1-E1-C6
atctgcttgacttttcttcagaggagctcacttggtctgcttctgcttctgagaatcccaaaggtaagggcaacggaacaggggacgttggatcggacacaaggacatggttnagtgctgctctctccaaccaagccacttgtatggaaggcttcgatggtacctctggtctcgtaaaatcccttgtcgctggcagtctcgatcaactatattctcntgcttagggaattgttaccacttgtgcaaccagagcagaaaaccaaaggctgtttctaaacctggccctattgctaaaggaccgaaggcaccacctggccgtaaactcagagacaccgacnaagacgaaagccttcaattccaagactggggtcagaccggacgatcgtaaactattagaatcaaacggtaggacttacnacttantgtaccattggatgggaanaggcaa

SEQ ID NO: 16837 - DNA, 423 bp, Arabidopsis thaliana
  unsure at all n locations
  Clone ID: LIB25-006-Q1-E1-C7
aaaggacacagcttttacttctataactgagcgaagcaggtgaaaaaatggcgaatcggaagttagagaagatggcatcgattgatgttcatcntcgtcaactggttcctggcaaagttagtgaagacgacaagcttgttgagtatgatgctttgcttctagatcggtttctcgatatcctccaggatttgcacggtgaagatctccgtgaaactgttcaagagctttatgagcattctgcagaatacggganggaagcatgaacctaagaagctagaggagctagggagtgtgctaacgagtttagattcaggagattccattgttatcgctaaagcgggctctcatatgcttaacttaaccaatttggctgangaagtgcanattgcttatcgccgtaggatnaagaaactgaagaaaggt

SEQ ID NO: 16838 - DNA, 443 bp, Arabidopsis thaliana
  unsure at all n locations
  Clone ID: LIB25-006-Q1-E1-C8
ttaatggtttagttgagaaacgtcagatggaaaaggcggttgagatattagacgagatgatattggcgggtgtaagtgcaaacgaacatacttacacaaagatcatgcaaggctatgcatcagtcggtgataccggaaaagcctttgagtattttacaaggctgnaaaacgaaggtttggatgttgacattttcacttacgaggcgttacttaaagcgtgctgcaaatcaggaagaatgcagagcgcattanctgtcacgaaagaaatncntgcacggaatatcccgcgcaattccttcgtctataacatattaatcgacggatgggcacgaanangcgatgtatgggaanccgcngatcggatacagcanatgaaaaaanaaggtgttaaacccgacatcatacttacacatccttcattancgcttgttcnaaggccgcaa

SEQ ID NO: 16839 - DNA, 179 bp, Arabidopsis thaliana
  unsure at all n locations
  Clone ID: LIB25-006-Q1-E1-D1
gagctctagtgtgcttgatgacttttgtgttaaaacgagtgtcttggttactttatgaaatattctaccggctttatttctttcgtctgctttctagctcgagctatgtctgantttatacacaaatgtctttcagtagcaaaaattctgcactaaaaaaaagaaaaaaaaaagggcgg

SEQ ID NO: 16840 - DNA, 71 bp, Arabidopsis thaliana
  unsure at all n locations
  Clone ID: LIB25-006-Q1-E1-D10
aaaacanagctcctgagctcagacaggtgatagcagcagcngttgcangcaacaaggagaaatataatgaa

SEQ ID NO: 16841 - DNA, 491 bp, Arabidopsis thaliana
  unsure at all n locations
  Clone ID: LIB25-006-Q1-E1-D12
nngnnnnttntngggccttcnaacgccgcnaagtaccggtcagaaattcccgggncganccacgcgtccggtgaagatgatgtgcacaagagcattaaatataatgtttgggctagcacaccaaatggaaacaagaagcttgctgcagcataccaggaagctcaacagaaagctggcggctgtcccatctttctgtttttctcggtcaatgcaagtggacaatttgttggtcttgctgaaatgacaggaccagttgatttcaacacaaatgtggagtactggcagcaagataagtggaccggctctttccccctcaagtggcatattgtgaaggatgtgccaaacagtttactgaagcatattactttagagaacaatgagaacaaacctgttaccaacagcagagacacacaagaggttaanttggancaaggtttgaagattgtgaaaattttcaaggagcatancagcaagacttcattttggtgatt

SEQ ID NO: 16842 - DNA, 492 bp, Arabidopsis thaliana
  unsure at all n locations
  Clone ID: LIB25-006-Q1-E1-D2
gaagaaaaagctctcaactttcttcgatttctcagggaactctttcgttaatctcaaactcaatcagtgtctaccccagctgaatcttcagactcgaaatcgaagaaagatttcagtactgntattctcgagaggaagaagtctccgaaccgtctcgtcgtcgatgaggcgntcaacgatgataactccgtcgtctctcttcaccctgcaaccatggagaagggtcagctcttccgtggtgataccattctcatcaagggtaagaagaggaagganggtgtctgcattgctcttgctgatgagacatgtgaggagccaaaagattaagaatgaataaaagtnatcaagattctaaactttgaagggttaagactnggggagaatgttaataatcccggntcaaccaaatggccccaagaacnttcaaagttacggggaaagccttgtttcaaaaacccnggcctggttnnannaanaantggttngaaaggg

SEQ ID NO: 16843 - DNA, 527 bp, Arabidopsis thaliana
  unsure at all n locations
  Clone ID: LIB25-006-Q1-E1-D3
ggnnnnnnnnggnnnnnnngnaactgttancctgnccgtagccgtccgaaattccngggtcgacccacgcgtccgtccaactcccaaaaatggcgattcgtcttcctctgatctgtcttcttggttcattcatggtagtggcgattgcggctgatttaacaccggagcgttattggagcactgctttaccaaacactcccattcccaactctctccataatcttttgactttcgattttaccgacgagaaaagtaccaacgtccaagtaggtaaaggcggagtaaacgttaacacccatngaggtaaaaccggtagcggaaccgccgtgaacgttggaaagggaggtgtacgggtggacacaggcaagggcaagcccggagganggacacacgtgagcgttggcaacggaaaagtcacggaggtggcgtcgcaatccacaggggttaacccggtaaaagaaccgacgttaggantccgtaaangcgtgtgacggtgcacacgccccacaagggaaaaccgatttact

SEQ ID NO: 16844 - DNA, 446 bp, Arabidopsis thaliana
  unsure at all n locations
  Clone ID: LIB25-006-Q1-E1-D4
tggcaatttcctcaaggttcttctcaggaacttcgatgttcttgctgggcctgtggcggagtctcgtttatcctctatatgcttcagttcaagcgattgaaactcaatctcatgctgatgacaaacaatggctaacttattgggtcctttattcattacntacactcatcgagctcacattcgccaaactcatcgaatggttaccgatatggggatacatgaagctgatcttgacttgctggcttgttattccctactttagtggntctgcttatgtctatgaacattttgtgagaccggtgtttgttaaccctcggagcattaacatttggtatgttgccaaaagaagatggtngncttcagaaaaacaaaccatgttgttaacaanctgctgaaaaatncattgcaaaagaatggacctgaagccttttgaaaaaantttaaac

SEQ ID NO: 16845 - DNA, 519 bp, Arabidopsis thaliana
  unsure at all n locations
  Clone ID: LIB25-006-Q1-E1-D6
nnnnnnnnnnaantggttantgttncccctgccgtaccnagtccgaaaattcccgggctctgcaacatctgaagcagtaacagaggctgagccaggtttgatgatgaacttctacaaggacacgtgtcctcaggcctaagacatcgtccgtgaacaagtcaaactcctctacaaacgccacaagaacaccggtttctcttggctccgtaacatcttccatgactgcgccgttgagtcatctgatgcgtcgcttttgctggattcgacaagaagagagctaggagagaaaganggggacaggagcttcggacttagaaactttaggtacatcgaggagatcaaggaaggtctcgaganggagtgtcctggtgttgtctcangttctgacattctcgtcttgtccgcaagagaaggatcgaancantaggaggangggatattcctttgaagacaggaagganagatggncttaaaagcaggacgatatgcccnantcatatcttcccgacacaacaagat

SEQ ID NO: 16846 - DNA, 438 bp, Arabidopsis thaliana
  unsure at all n locations
  Clone ID: LIB25-006-Q1-E1-D7
agaggattcgagagcgagagagacttcagatcgagcagattcgtgagcttgattgcgaggaattacaagtcgaagaagtcgatgaccttcacgattccgattccgatgataataatgatgatctctcttcatttcctttctcttcccacgctcaagcttctggtaacctcggtgatgatgaacttatgttcaacccagctttggcttcttggcatatgtatcttggcgaggttgaagacactcaaaacagagtttcttttgtgggtggaggaacggtattgaagatcccgcttttctatcntgaaggagtggttcnatttcctgaggcaacactccccccttagaatcattgggcctanttccttggctgcngttgaganagctttgaaccaagctaacgctccttctacgataaggtgtgattcgtgtttaaagana

SEQ ID NO: 16847 - DNA, 440 bp, Arabidopsis thaliana
  unsure at all n locations
  Clone ID: LIB25-006-Q1-E1-D8
gcacaatttttctacggtcagagattcaaaagagttctttctctctatcttacggnccgatcatcatgatgcagcagccaccacccggaggtatccttccacatcncgctcctcctccttctgcgcaacaacagtacggttaccaacaaccttatcggattgctggagctgctccaccaccaccacagatgtggaatcctcaagcggtnggggccgccatcagttcagcctacgaccgctgacgagatccggactctttggnggggggactacagtattggatggatgagaatttcctctacggttgctttgctcataccggagagatggtttctgctaaagtgattcgttngnaagcaaaccggtcaagttgaaggatacggtttcaattgaattcgcatctcaagctgctgctgaaagagttctacaaacattcaaca

SEQ ID NO: 16848 - DNA, 475 bp, Arabidopsis thaliana
  unsure at all n locations
  Clone ID: LIB25-006-Q1-E1-E1
caagtatcttggtacacgagttcggtccgatggaaccattggagagtattcatggatgacatatggagaagcagcgtctgagcgacaagccattggttcaggactcttgtttcatggagttaaccaaggagattgcgttggactctattttattaacagaccanagtggttggttgtggatcatgcttgtgcagcatattcatttgtctctgttcctggatatgatacacttggtccagacgctgttaagtttgtggtgaatcatgctaggtctgcaagctatattttgtgtaccacaaaccttgaataatttgctaaagccttcctancggnaatcccaatccattccgtcctcaaattgttgtgggtggggaaaggggcttaatgaancaattttgccaatcaactttcctccaagggaactgggngtcccaaattgttatcaatancaaaaaagcctaattggngtccaagg

SEQ ID NO: 16849 - DNA, 491 bp, Arabidopsis thaliana
  unsure at all n locations
  Clone ID: LIB25-006-Q1-E1-E12
ngnannttnncngccntctacgccgcaaagtaccggtcacnaattcccgggncgacccacgcgtccnaacgctgcaaggcctaacccccaaggctcataccattacggaaagatcaacattacccgtagcatcaagcttgtcaactctaaaagtgtggttgacggtaaagtccggtttggtttcaatggtgtatcacacgttgacaccgagactcctttgaagcttgctgagtacttccaaatgtcagagaaggttttcaagtacaatgtgatcaaggacgagcctgcagccaaaatcacagcattgactgtacaacctaatgttctcaacatcactttccgtacctttgtagagatcattttcgagaaccacgagaagaccatgcagtcatttcatttggatggctactccttcttcgctgtcgcttctgagccaagggaggtggacacctgaaaagagagagaactacaacttgctccaatgcngttaa

SEQ ID NO: 16850 - DNA, 452 bp, Arabidopsis thaliana
  unsure at all n locations
  Clone ID: LIB25-006-Q1-E1-C2
ctaacaaatgcacacctcactacacgcatacatacatcatgagngagctttaccacatcattaccatacccttttcacatcctactagtctttatccgctccatggcatcaatcactctactgggtcgaatactctcaaggcccaccaaaaccaaagaccgatcttgccagcttcctcctggcccaccaggatggcccaccctcggcaatctacccgaactattcatgactcgtcctaggtccaaatatttcngccttgccatgaaagagctaaaaacagatatagcatggttcaactttgccggnatccgtngcatcaacaattaaactccggacgaagatttgctccgangaaagcgtttaagaagaacgaagacgcaagattttgggcaagaaccgggcctcaaacttttcaacatgggngacaatccggngaacaanttncaaatcca

SEQ ID NO: 16851 - DNA, 59 bp, Arabidopsis thaliana
  unsure at all n locations
  Clone ID: LIB25-005-Q1-E1-H12
tgctgctgcgatacagtatattgtaaatcattacacgtaacaagttcagtgtcngcagc

SEQ ID NO: 16852 - DNA, 418 bp, Arabidopsis thaliana
  unsure at all n locations
  Clone ID: LIB25-006-Q1-E1-A10
catgaactaagcaatctcttgtaagtcannaggcatcacaagcaatcatgttgccnnngttcgatccaacagacnagccaagcttgtctgtctcttcttgaggatgtgactaccaangtnaagcngattcaagnttctgtcttggaagcaattctttcncgtaatgctcatancgagtatcttagtggtttcctcaacggtcaagctgataaganaagcttcangaagaatgtacccgttgtaacctacgaccgatattaagccttatatcgatcgtatcgccaatggananccgtctgatctcatctgtgatcgacccatcattgtactcttgactagctcaggtacntcaaggaggattccgaagctgattcctttgacagcatgaggagttggancaagaggatttctttgcntc

SEQ ID NO: 16853 - DNA, 417 bp, Arabidopsis thaliana
  unsure at all n locations
  Clone ID: LIB25-006-Q1-E1-A12
gaatgatatgttaaagaagggtgttgatgaaggaagatggtccgagaagtttgtttccagaatcgagtttaaaggggacatggttgtggcgactccagatatcttccaagtacctctgacatctgatgtggaattcattattttagcttctgatggattatgggactacatgaanagctcanatgtggttagttatgttagggatcagctccggaaacatgggaatgtgcagcttgcttgtgaatctcttgcgcaagtagctttggaccggcgatctcaggacaacattagcatcattattgctgatctaggaagaacagagtggaagaatctccccgcgcagcgacaaaacgtatggttgaactggttcaggctgcaacgactatcngtttagttactgttggcatatggatgtct

SEQ ID NO: 16854 - DNA, 473 bp, Arabidopsis thaliana
  unsure at all n locations
  Clone ID: LIB25-006-Q1-E1-A2
aaggaggaaccaattattgcgttcagtggagaggaaggcaatggtcggtacttggacttgcatgntatgtataaccagtacatcaactctaaatttggggaaagggttgaatattctgcttaccttgatgttttttctcaaccagagaaaataccgcgtaaactgaagttatcgaggcaatacatgaagtatatggaagctctacttgagtacctggtccacttcttccagcgaaccgagcccgttgcaagatcttgaccgggatactttccaaanggttgttcctgaattttgaagaagcaatatgcaaattggaataantanaaagggcctgggataatgaacttaatccatctcaagcataactgtcataanntctttgattactacagtacaagtccaaggaactggtaaatgttaggacctgaaaaagcctaaaanaaggcaattggggggcaattaaggactgaaag

SEQ ID NO: 16855 - DNA, 422 bp, Arabidopsis thaliana
  unsure at all n locations
  Clone ID: LIB25-006-Q1-E1-A3
atgggaaaggcacgtacggtgggagtgggaatggactagtctccgacgagcaaattagctctccggtgggcggcggagaatctccttgaagagngcgacaccgtcatcttgattcacgtccaaccacaaaacgccgatcatgcccgcaaaatcctcttcgaggaaaccggttcaccgctaattcctttggaggantgtagagaggttaatttgtctaaacagtatggacttgcttacgatcctgatggncttgatgttcttgatactctctctanggctaaaaaggtgaaggttgtacaaaggtgtattggggaaattcaangggagaaactttgggatgctgtcnaaaatctaaaactccattccaattgntccttggaatccaaggttgggttctcccaaaaggatcttgctgggtaatt

SEQ ID NO: 16856 - DNA, 461 bp, Arabidopsis thaliana
  unsure at all n locations
  Clone ID: LIB25-006-Q1-E1-A4
gcgctgcgagcatccttcgtcttcacttccacgactgctttgttaatggttgtgacgcntccatcttgttagacaacacgacatcatttcgaacagagaaagatgcgtttggnaacgcaaattcggctcggggatttccagtgattgatagaatgaaagctggcggtggagagggcatgcccaagaaccgtttcatgcgcagatatgctcaccatctgcaagctcaacaatctgtcacttttggcaaggagggccttccttgggagggttccctnggggaaagggagaagacaatttaaaaagcaatcctgggaactccgccaatgcaaatccttccagctccattccttaaaacttccaacaacttaaagccnncttcanaaatgttggnctcnattgtccttccgatncccttgctctctcccggtgggcaaaacatttggtaaaaatcaatgtcagtt

SEQ ID NO: 16857 - DNA, 418 bp, Arabidopsis thaliana
  unsure at all n locations
  Clone ID: LIB25-006-Q1-E1-A5
ctttctttctctgggagtttgggattttcttaagggtctttttcaattctcgctccattttgtacgcatagaactgggtttgtgtttacacacataaagctcttatcttttttcttctttcaatcgagaagattataganctgagtgactgattggtggtttcttggagttttaatgggaggttgtttcatgnggtcggattaaaacagatattgcttccagtacatggctaagttcgaaattcgggagtanagatgggagcaagggctcgtcgaccgcttccttctcttatatgcctcgaacagaaggcnagatcttgcaaaatgctaaactgggaaactttaatcccaatnaactgaaatctgcaactaaggaaattccggcctganattgtggttggtnaaagtgnattggttnc

SEQ ID NO: 16858 - DNA, 450 bp, Arabidopsis thaliana
  unsure at all n locations
  Clone ID: LIB25-006-Q1-E1-A6
tggatctacttgttggtgaaagaagtggccccattaaacttgaagtgacaagacggcatagccttggagatgatttagagcgtcnaatgtccgtggcagaaaatccattcacaattttatatgcggtgctccatgagctgtgcgttgccattgtcatggacacantcataagacaggtccgagctcttctgcaggggagatggaaagatgcaattctcttcgacttaatttcagatactggtancacaacaagcgaancaaagaaaggagaaggnatantcctgttaatcctccnaacgcaaggnaatgaaacttttttactgggtcagattctgataaaaattctggcccatttattaaaattgancnatggtcagntctccagattaaatgttctcacagcacatttgtaattgacccacttacnggcaaggaaccgantttccccnc

SEQ ID NO: 16859 - DNA, 424 bp, Arabidopsis thaliana
  Clone ID: LIB25-006-Q1-E1-B11
aaagaaggatgagtatgttgtcagggaaagctgcttacgatctctttgtctatggcagtctccaggaacccgaagtcgtatacgtgcttcttaatcgcgtccctgaccatgtctccgccgtactctccggctttcacaggtttagactcaaaggccgtgtctatccaacaattctaccggacggtaccggaaaagtcaacggaaaggtgctaaagggcataacagatgatgaactgaagatgttagatgagtttgaagatgttgaatatgacagaaagactgttgaagtaatgctgacggatacttcagagaagctgcaagtcgaaacatatgtatggaagaacaaagatgatccggatctttatggagaatgggatttcgaggaatggagacaacatgacaaggaagatttcgtaacagcgac

SEQ ID NO: 16860 - DNA, 466 bp, Arabidopsis thaliana
  unsure at all n locations
  Clone ID: LIB25-006-Q1-E1-B2
tccgatataatctgatcaaatcatcgccgacgatcaccgattcagcgatgcaacagggagattacanttcgtactatcaccaccaatactctcaatttcaaaatcctactccgaatcctaatcctaatcccaatccttctccgccggcgccggcaaccgtagctggtccgaccgatcttactcgaaacacgtacgcatcagcgccaccgttcaccggcggttaccngttccgccgattactctaactattcacagaattacactccttacgggcaannnntctgagcaatgtcctcccttaagtcctttctttaactnaacatcaaaaactcctcctttctccggcgggcgaaatnactnaancctnantcggtaatcaaacttnaaacaaacaacaactccaaccaangaatcaaccaaaaactccaatcctccttaangggtnaatttgattcccaacngcncc

SEQ ID NO: 16861 - DNA, 453 bp, Arabidopsis thaliana
  unsure at all n locations
  Clone ID: LIB25-006-Q1-E1-B3
ctccacgatccacgccttgaccttcgttttttttttctcagagattagagaaaactccgataancaatttctcaatctttttgtagatccaatttttccaggaaaaaaagaggtttcgcgaagaagatgagttttcaagatttagaatcaggaagaggaagatcaaggaggaaattcaatggtggtcgacaagattcgacacaagccgttgcttctggaggnttccagatcaataccggagtctccacgtttcagcgactcgttaacacactggggtactcccaaagatacaccggagctccgggagaaactgcacaagacaaggttgcatattggacagcttgtgaanggatacttcagctgggcttaaaagaanctantgaaactgatcatcaaagccgtgtcaatccaaagtaaagaagattgcanatgccaagcctgcaaagggacttt

SEQ ID NO: 16862 - DNA, 484 bp, Arabidopsis thaliana
  unsure at all n locations
  Clone ID: LIB25-006-Q1-E1-B4
gcccacgcgtccgggaaaaactgcttcctgaatcctacaagcagaaaggaattgagttgatactaagcacagaaatagtgaaagctgatctctctgccaagagtcttgtcagtgcaactggggatgtcttcaagtatcagacgctcataattgcaactggttctactgttctcagattgactgattttggagtaaaaggtgcagactctaagaatatcctctatctgcngagagattgatgatgccgacaaattggttgaagcaattaaagctaagaaangtggaaaaggctgtaattgttggcggaagntaacatgggccttgaacctaagtgcaattttaaaggttaacaatttaanatgtcactaaagggtttccccctgaaaccttgggtgcaatgcctaaggcttttcaaccgnccgaataattgcctgccttccaatgaagaacnttactaatncnaaacaaaggggaattgaaanat

SEQ ID NO: 16863 - DNA, 184 bp, Arabidopsis thaliana
  unsure at all n locations
  Clone ID: LIB25-006-Q1-E1-B7
cncancatgcancccatggtacggatctgaccgtgtcaantacttggggtccattctctggcgaatcaccgagctaccttaccggaaagttccccgnagggtacggatgggacaccgccggactttcanctgaccccgagacattcncaaggaaccgtgaactanaattatccacagcatgtgc

SEQ ID NO: 16864 - DNA, 456 bp, Arabidopsis thaliana
  unsure at all n locations
  Clone ID: LIB25-006-Q1-E1-B8
gagaccatcaaaaattgcagaaaataggcttaatctgaatctcttctcctccgtcgaagttttgaattctctctggttctccaattctcctctcgagctgccttaagcttcgcatttacgtttacgttatgcacgaatgagatcatcgtagatcgtaggttgaagaagcgagagataaattaggagagcgaagatgagcgagggccagaagggnccagttgggaacaatcggcgctttgagtttgtccgttgtgtcatctgtcccgattgtgatctgtaacaaagcgcttattagcacccttggcttcacattcgcgactactttgacaagttggcatcttttgggtcacatttcgnttcccttcaaggtggcattaagggatgaaagaatgttccaacacaaanccnttttgattcaangaacctgttaatgggnattttggcaataattnaatg

SEQ ID NO: 16865 - DNA, 436 bp, Arabidopsis thaliana
  unsure at all n locations
  Clone ID: LIB25-006-Q1-E1-C1
gaaagaagatggtcggttgagctatttttgcttctcccgacaaaattctcagatccgantacttccaccatcatcattcatttataagatctgggttttacacagctctgcgagtacagtaactatgagaaggagaggaggggatagtttccggagagctggacggaggaagatctcgaatgtggtatggtgggttctctctggtattgccctgggngctcttctttctcattctctccaaagctggtcatattgaacctagacccgggattcctaagcgacgttaccgtaatgacaaatttgtananggtatgaatatgactgangaaatgttgagtcctactccgttgctcgggaagttaatgattaaaattgccctgctaaaanctttggttgcaatgctaaannaanttagaatctcanttgcttggactta

SEQ ID NO: 16866 - DNA, 425 bp, Arabidopsis thaliana
  unsure at all n locations
  Clone ID: LIB25-006-Q1-E1-C12
ncattgacacgatcattaccagcattggctccaactacgaagcttgggcggttgatttctcctcattcgtggtcgactcgagagactctctctcggtccaaaggttcgagaagtcccttaagaagatgaagcccgagacagctcttgccttagctaagatagtgtttggtagcgacgagagagagattttgggacaagtgtcagtgccttgccatgtcatacaaccaggaaacgacgtcgtagtgcctgtctccgtcgcatacttcatgcaggagaagattaaggggaaatcgacagtggagatcatcgaggacgcgatcgggcattttccacaggatgacatcacatttggagctgcttggggtcatgangcgcctccttgagtttaaggcttatataacaacnttgcgtccnttgatngantt

SEQ ID NO: 16867 - DNA, 73 bp, Arabidopsis thaliana
  unsure at all n locations
  Clone ID: LIB25-005-Q1-E1-G9
catggtgttgtcctgtcatgtgccaataattggctttctcgtattcaaaagcnggcattttttacncggaaag

SEQ ID NO: 16868 - DNA, 429 bp, Arabidopsis thaliana
  unsure at all n locations
  Clone ID: LIB25-004-Q1-E1-G7
ggagaagtcgaagcttcacgatcgtataataatggcgacggcttcagttgcttttaagtctagggaagaccataggaagcaaattgaattagaggaagctcgtaaagccgggcttgctccagctgaggttgatgaggatggaaaggaaattaatcctcatattccgcagtatatgtcatctgctccatggtatcttaattctgaaaaaccgagtttgaagcatcaaaggaaatggaagagtgatcccaattacactaagtcgtggtatgatagaggtgcaaagatctttcaagctgaaaaataccgcaagggagcgtgtcaaaactgtggtgcaatgacgcatactgctaaagcttgtatggatangcctcgtaagattggggcgaagtacacaaaacatgaacattgcacctgatgagaaaattgaaa

SEQ ID NO: 16869 - DNA, 415 bp, Arabidopsis thaliana
  unsure at all n locations
  Clone ID: LIB25-004-Q1-E1-H1
aaccgtcttctcatctctgcctctggatttaactctcccttcacagttgcatagaatcttcttctctgctcatattttgaagaaatctccagtcgaagaaactgctccctcttttagtcaattctcgcttcactccctcaatataatgcgatttctcaaccggaatatctgaatctctcggtggttacctctgatatatcgccaggaactgaactcctactcgatctctatcaacaatgccgtccttgtagaactttggatccaactctctgattccgtcaatttcattaatatcagctcagcgaaggaactttgagtagaagaaagataatgtcacattcatgggatggtcttgggggaagattgcgtcagttggtcaactgactggtttanatgcngtcaagttgattggtcc

SEQ ID NO: 16870 - DNA, 113 bp, Arabidopsis thaliana
  unsure at all n locations
  Clone ID: LIB25-004-Q1-E1-H11
tctcncacgaacatcttcctcnccggtcgacgtttctccatcgtgatcagaatgtcagcctcttcctcancgactcctccacccantgctacctcaaaatcgagggagggant

SEQ ID NO: 16871 - DNA, 52 bp, Arabidopsis thaliana
  unsure at all n locations
  Clone ID: LIB25-004-Q1-E1-H3
acaacgacattacttccatcacaagcaacggnggaagagttaactgnatgca

SEQ ID NO: 16872 - DNA, 516 bp, Arabidopsis thaliana
  unsure at all n locations
  Clone ID: LIB25-004-Q1-E1-H6
gnnnnnnngaaantcctnccgcnctcggtaccggtaagtnaattcccgggccgacccacgcgtcnanccacgcgtccgcccacgcgtccgcccacgcgtccggagccgatgaagagtacnattacctcttcaagctcgtgttgatcggcgactctggtgtcggcaaatcgaatcngctctctcggttcaccaagaacgagttcaatctcgaatccaagtctactattggtgttgagttcgctaccaaaancactaaagtcgaaggcaangtcgtcaaagctcanatttgggatactgctggtcaagagagataccgagcaatcacaagcgcttattacagaggagctgttggtgctttgcttatttacgacgtgacaatgcacgcaacatttgagaatgcatcaagatggctaangggaactaagaaggacacacaaganccaaacataatgggggatgccttataagggaacaaagtgcgattcngcgtcacttggtgggaantcaaaacanatt

SEQ ID NO: 16873 - DNA, 188 bp, Arabidopsis thaliana
  unsure at all n locations
  Clone ID: LIB25-004-Q1-E1-H9
gtggtgacaggcttattcgtggggcnaaacaaangacacgttgttnccaaacgctagcaacctcctcgccctnacagcacattggggaaaacaagcacaaggactatttttatcaggaatctcatcanggaagttgcgggtcaagctccctatgatnaagaggatcactnagcttttgaaggttggta

SEQ ID NO: 16874 - DNA, 432 bp, Arabidopsis thaliana
  unsure at all n locations
  Clone ID: LIB25-005-Q1-E1-A10
anncatanaaattgaacaacaagtttttttttcctggcttctaaaanaagataactaaaaatttaacaaggtttatactactatgatactacactgttagcagttagcttcatcttcagccacgccgttaaacttccatcaaccaaanatagttaactaaatcgttgaagatgccacgtgtttcggcggaaattttagatatttctcacaccggcggcaacgagtcaccgacgcttggcgaactcctgaaagatttcaacgacagtggccggaaaaaatatcccggcgaaaatgctccgactcaacacatattggatctcgctcccgcggctganacacgatctgtgccgtttctcttatccttcaacaatctcagttacaatgtttgtacttcgccgggnggttgatttcncccgggaaagaccgcntccg

SEQ ID NO: 16875 - DNA, 501 bp, Arabidopsis thaliana
  unsure at all n locations
  Clone ID: LIB25-005-Q1-E1-A11
gnnnnnngnngngnaattctncgcggtcgntacgggcatggnacggtgancaattcacgggtcganccactctttcataacaaaacactgctcttccttctctccgccgccgcatcgttaaatctctccgtcatctgtaaccggttaaagtatttccctcaggtcgacctgaaaacgatgggcaaacgaggaccgaagaagcttacaaacactcaaggaggaggaggacctaatctcaaatctgtactgagacatgagcacttgaagaatctcgctctctggtcttccaccggagatactcctatcccgtctcttgcttcattactcggtcgacgtctcgctgccgacactgaatccaccggaatcactactgatcccgatctcgtctcttgtcaaaggtgtgagaccattcttaagcctggattcaattgcaatgttagaatanagaaaggttctgctaatgtgaagaaanaacttataggtgcaagaantctaacaaca

SEQ ID NO: 16876 - DNA, 491 bp, Arabidopsis thaliana
  unsure at all n locations
  Clone ID: LIB25-005-Q1-E1-A12
ngcaattcnagcaggtcgttacgggcagnnattcncgggncgacncacgcgtccaangcgaaanagaattggttgcttttacccggaatcgtatctgctttcatactccatactgttctgaanaaaggaggttctgaangcttcaatgtcacanccaaagatataaaagaggaaagcatacagactaaacttgttgctgcgacagaaaataatgtgaatgcaaactctacgaatgtggagacccaaactgctattacagcccctaanaaaggcagcggttgcggcggtggctgtagtggtgaatgcggaaacatggtgaaagcagctaatgctagcggttgcngcantagttgtantggagaatgcngagacatgntgaaatcagcagcaaatgctancggctgcggtactggttgtancggtgaatgttgaaaatatggtgaaancanctaaccctantggttggttggttatggggctaaatccaaccc

SEQ ID NO: 16877 - DNA, 72 bp, Arabidopsis thaliana
  unsure at all n locations
  Clone ID: LIB25-005-Q1-E1-B9
ttgcngcttcaaccggagctcttcctctgcttttacgntccttctccacactcgtcgattctcaanccaata

SEQ ID NO: 16878 - DNA, 505 bp, Arabidopsis thaliana
  unsure at all n locations
  Clone ID: LIB25-005-Q1-E1-C11
ngnnnnnnnnggnnngnaattctaccnggtcntntaacgggcacnnattcccgggacgacccacgcgtccanccaaattgtcntcccagaggcgaggacacacaacctcaatctgttcgtcgctgtcgcagatcggagagatgggtgtcgatttggaatcggtgtcggaagcaacctcgggagctattgggtcgcttctgagtacaacgatcttgtatcctcttgatacatgtaaatcaaagttccaagccgaggttcgagctcgtggtcagcaaaaatacagatatctttccgatgttatgtgggaggcaatttctaaaggacaagtcttttcactgtatcaaggccttggaactaagaattttcagtctttcatttctcagttcatctacttttatagctatagctatttcaagagagttcatagtgaaaggactggttctaaatcaattggnactaangntaanttgctcaatgctgctgctgctgggggcttgtacttcgt

SEQ ID NO: 16879 - DNA, 90 bp, Arabidopsis thaliana
  unsure at all n locations
  Clone ID: LIB25-005-Q1-E1-C9
nagatggnttctgatgaaccgaatgggagtggattaccacctccaccacctttcgtnccatcaaatcttgtccctgaagtggggcctgta

SEQ ID NO: 16880 - DNA, 497 bp, Arabidopsis thaliana
  unsure at all n locations
  Clone ID: LIB25-005-Q1-E1-D12
ggcaattcttttcgncctntnncgngnatacgantcgcgtgttncgantcacgggccnaaccacgcgtcaacccaacgtttgagattataataacatggaaggaatcattgtgagaagagttataccatctgataacagttgtctcttcaatgcaatcggttatgtcatggacaaggnnaaaaacaaagctcctgagctcagacaggtgatagcagcagcagttgcaagcaacaaggagaaatataatgaagcatttctagggaagctcaatgaagaatattgtgcttggattctcaatccanacaagtggggaggtgcgattgagctttcgatattagcagattattatggtcgagaaattgcagcttacgacattcanactagtcgatgtgacttgtattggacaagacganaanctacgannaaagagttatgctgatctatgacggtcttcattacaatctccttgctctgtctccnatttngnagggggngg

SEQ ID NO: 16881 - DNA, 487 bp, Arabidopsis thaliana
  unsure at all n locations
  Clone ID: LIB25-005-Q1-E1-E12
ggcaattctncccgnccntntccgggnanagattcccgggtnnacccacgcgtccaattaaagtcaaaggcgtcacgtttatgtcttctccttctcgttgcgtgtatcgccggagcatttgccggagacgtcatcgaactcaatcgatctcagagggagttcgattatttcgctcnatctcntcaatggnctggaacctattgccgtggaactcgccattgttgctccaaaaacgcttgctgcagaggctccgatgctccaactcaattcacaattcatgggttatggcctgactataacgatggttcgtggccttcatgttgttatcgatctgactttaaagagaatgagatttcaacnttgatggntggtcttgagaagtactggctagtctcagttgtggttctcnatcatcatgcaatggtggggaaagggtcantttgggggccacnagtgggannannntgggacttgtccttcccctgtt

SEQ ID NO: 16882 - DNA, 73 bp, Arabidopsis thaliana
  unsure at all n locations
  Clone ID: LIB25-005-Q1-E1-E9
ctcttcgggtccttccaatntcgtgnttctccggcgctgagctgctcgagcctgtggtcacgtcaganaggca

SEQ ID NO: 16883 - DNA, 504 bp, Arabidopsis thaliana
  unsure at all n locations
  Clone ID: LIB25-005-Q1-E1-F11
gnnnnnnnnnnggnnngnaattttacgcnggtctntacgcngcngngtttcnnggaacgactcacgcgnccanggacgcgtgggcggcgattagcaaaggcggtggttcgatagagagaggaagagattgaagcgattttcactcagttttcatcagatcgtctcggtgattctagggttcattggtctcgttttgttcggtgactgcttgagtttcacgtttttggtttcgatttcttatgggagattcctcggtttcgacaagttcatgggctgtcattgaatctgctaataggtttcagtggtaggaaacttttgggtctgtttctagttgtgaattgaatagactacaagaagtaagcagaactgaatgtgcattccttttgtttttattgacaattgtgagttaacatgttcaggtgtcgagcgttatgggtgaagtcctctgggatnaagcagttcantggctgctaaaaattctccaacattgggttcaactcccaa

SEQ ID NO: 16884 - DNA, 438 bp, Arabidopsis thaliana
  Clone ID: LIB25-004-Q1-E1-G5
ttaaggtgacattgtttacaaagaagcatggtgttgtgcgtgctgaggaagatgctgagacagtatacgcttgtatcgacttggtatcaacgataatacagaggaagctgaggaagatcaaggagaaggactcagaccatggaaggcacatgaaaggtttcaacagattgaaggtaagggaaccagtgattgagccggttgtggaggatgttgaggacagtactgactcgagcgtaggagaagaagaagaagaggatgatttgatcaaggagattgtccgtaccaagactttcgagatgccaccattgactgtcgctgaggcagtcgagcagctggaactagtcagtcacgacttctatggcttccaaaatgaagaaactggtgagataaacatagtgtacaagagaaaagaaggaggttacggtcctgatatcccaa

SEQ ID NO: 16885 - DNA, 490 bp, Arabidopsis thaliana
  unsure at all n locations
  Clone ID: LIB25-005-Q1-E1-F12
ggngaattctacgcaggncttcttagctgtcnagtnccggggnngacnnacgcgtccgnccacgcgtccngcagtattcaaacaaataaaatatactgctttagctttggacacctcctcttactaatctctataactatatttaaaaagtagaaaataatggcacgtctatttgtcgtagttgcccttttggctttggccgtgggcaccgtattcgccgccgatgcaccttcagctgcacccaccgcctcaccaaccaaatccccaaccaaggctcctgccgctgcacccaaatcctccgccgccgcaccgaaagcatcatcccctgttgctgaggaanccacccctgaagacgactactctgcagccagccccantgactccgccgaggnaaccaacgtctcctccccaaccgctcntancccgaagccgatggtccctcctccgagggncctcatctgatggacccgccgncgncgantcaccaaaa

SEQ ID NO: 16886 - DNA, 446 bp, Arabidopsis thaliana
  unsure at all n locations
  Clone ID: LIB25-005-Q1-E1-G12
acgcgnccaantnancntnnaaacacaggaaactccangagctccagaaagagaagagtgatangttacagaaggtgctcgagtttgtgagcacggtgcatgatctatgtgccgtccttcgtttagatntcttaagcactgtcaccgaagttcatccgagcttagatgaggcanatggtgttcaaaccaagagcattagcaatgaaacacttgcaaggttggctaagactgtcttgactcttaaagaangataaaatgcacagacttaagaagcttcaagaactanctactcagctaactgatctatggnatctgatggatacttctgatgangaaagggagctttttgaccatgttacctctaacatttcagcttcagttcatgaagtgactggctctggtgcnctcgcacttgatcntatcgaacangncngangtggganttg

SEQ ID NO: 16887 - DNA, 432 bp, Arabidopsis thaliana
  unsure at all n locations
  Clone ID: LIB25-003-Q1-E1-D7
actcnccccagnncggtaanagtcnnnaattcccgggccgacccacgngtccgagagaaagagagatggcgagacacttattagaagatgtaatgagcatggccaccacaacaacacatttcgatgctagttacctgtttcatgttgtgttcctggctgtgatcggttgttgtatcctctccgctctgttattctcttgtgccgacggagtctccgacaacagagccacttcaggcacctctaccggtggcggaggttgtggcggtgccggttgcggtggtggttgtggaggttgagatttcatttttcttcgtcaggaaaatataaacagaacagtccgaccattttactttcgtttatagatgtatagctatcgtatattgaagcaataatttatttagtttcaaaaaaaaaaaaaaaaaaaaagggcgg

SEQ ID NO: 16888 - DNA, 437 bp, Arabidopsis thaliana
  unsure at all n locations
  Clone ID: LIB25-003-Q1-E1-E1
agaaactaacagatacagaggtatcacactcctcttcaatgagcccccagaggctagaaaacccagcgaacgatggagactgtatgtttttaaggatggtgaaccactgaatgagccactctgccttcaccgccaaagctgctacctctttggacgtgaaagaaggattgccgacattcctacggatcacccatcttgcagcaagcagcatgctgtcattcagtaccgggaaatggaaaaggagaaaccagatggtatgatggggaagcaagtgaagccttacataatggatcttggtagtaccaacaaaacttatatcaatgaaagtcccattgagccacaaagatattatgagctttttgagaaagacaccataaagtttggcaacagcagccgagagtacgtactgttgcacgagaattctgccgaatgaatna

SEQ ID NO: 16889 - DNA, 494 bp, Arabidopsis thaliana
  unsure at all n locations
  Clone ID: LIB25-003-Q1-E1-E2
ntgnngcaattctacttttncggccggtcttanataacgggccgagccacgcgtccnattatctctatggattgcattccgccggaaatcccggagatcatctcacaagctgttacccttcagtcagnataccacgcgtggcgaaagatatcagggttgatgatagagttgggtttcaaaatcataatgaaaatttatctatcacaaatgctgataaatctagtgacagaaactctgggaagatgatgtcttacttgggaagaacgaagtctagtgataatgatagtataagtcaatgtagctctgtgcatcatcatgagagagcttgtagttctcactctggtgaagatggaagctttggagctgcttggagacaaaattccctatcacagggcggggctagtaacaacatctcctttggttggtttgccagaaatatctcatcttggntgggggacactgggttacncctaggggattttcaactngcanca

SEQ ID NO: 16890 - DNA, 495 bp, Arabidopsis thaliana
  unsure at all n locations
  Clone ID: LIB25-003-Q1-E1-E4
gntgngnaaattctagtnttcgggccggtcaccnnataacgggncnagcncgcgtccnatctttgttcatctctctatcttcttctccatcctcttcatcactctcccatcttcttacagctgcaccgaaaatgacaagaatgccctccttcaaatcaagaaagcacttggcaatcctccccttctatcctcctggaacccccgaaccgactgttgtaccggctggaccggcgtcgaatgcactaaccgtcgcgttaccggtctcagcgttacctccggcgaagtctccggtcagatctcgtaccaagatcggcgacctcgttgacctccgtacactagatttcagctacctgccacacctcaccggaaacatcccacgcaccatcaccaaactcaagaacctcaacactctctacttgaagcacactagtctctccggtccgattcctgattacatcagcgagctcaagagnctcacgttcctggncctttctt

SEQ ID NO: 16891 - DNA, 422 bp, Arabidopsis thaliana
  unsure at all n locations
  Clone ID: LIB25-003-Q1-E1-E5
gaactttttgtcgaaaataattgaattccgattttgtttttgtatggtttttgatgtttcagatggtggacagaacttggtttagaaaaagatgtggagaaggcaagaagccagccgttaaaatggcatacgtggtccatgaaaattcttcaagatccgaccttaaccgaacaaaggcttgatcttaccaaaccaatatcgcttgtttatgttatagatgacattttcgatgtctatggggagctagaagaactaaccatcttcacacgagttgttgagagatgggatcataaggggcttaagacgctacccaaatacatgagggtttgttttgaagctctagatatgatcacaacggagattagcatgaagatctacaaatcacatggttgggaacccacatacgctcctcnanaancgtg

SEQ ID NO: 16892 - DNA, 415 bp, Arabidopsis thaliana
  Clone ID: LIB25-003-Q1-E1-E7
aggacttgctcgtgtctcctttactgattccccttctgctgtgttttggactgactacgttgctacaagatggtaccgtgcgccagagctctgtggttccttctattctaactacacgccggcgattgacatgtggagtgttgggtgcatatttgcagagatgctaactggaaaacctttgtttcctggcaaaaacgttgtgcaccagctagaactcgtgactgatctgcttggaactccgtcgccgataactctatccagggtttgttttgtttttatttttcccggaagctaaactaactctcccaatacagaggcttctctctctctatctccgagagatagacttgctttgaacgcaagtgtgtttttattagctttgtgtgtcatgaaattgtttaaaatgaatctgtgt

SEQ ID NO: 16893 - DNA, 506 bp, Arabidopsis thaliana
  unsure at all n locations
  Clone ID: LIB25-003-Q1-E1-F11
gngtnnngaattccnccgnactacgggccagnttcccgggacccccacgcgtccggaatttttgttcngatctacttctccggcttatcaccgatttagatctaagcctgaggtttccttttgcattttagagattccgagaatganacaacggcaactattttccgtgtttttgcttctcttanctttcgtttcgttccanaagctttgctactgtgacgatcaaacggttctgtangaatcgtncgatganccttttgatggccgctggatcgtttcgaagaatagtgattacgaaggtgtatggaagcatgcanagagtgaaggacatgaggattatggacttctcgtgagtgagaaggctaggaagtatggaattgtgaaagagcttgacgagcctctaaacctcaatgaaggaactgttgttcttcagtacgaggttcgtttccangaacgacttgagtgtggtggtgcttacttgaagtacctccgtcctcangaagctg

SEQ ID NO: 16894 - DNA, 513 bp, Arabidopsis thaliana
  unsure at all n locations
  Clone ID: LIB25-003-Q1-E1-F12
gnnnggnnnnnnanctgtttacgcctgccttaccgggccaaaattcccgggaanacccacgcgtccgaccaaaacaaagctcaatcatggctagtcggagagaagtacggtgccggtgcggcagacggatgtgggttcaaccagacgcccgtaccgtccaatgctcaacctgccacaccgtcacgcagctctactcgctagtggacatagctcgcggtgcaaaccgcataattcatgggtttcaacagctacttagacaacaccaaccgcaacatcatgaacaacaacaacaacaaatgatggctcaaccgccaccacggctgcttgagcctcttccctcgccgtttgggaagaagagagcagttttatgcggcgtgaactataagggaaaaagttatagcttgaaaggttgcatcagtgatgctaagtccatgagatctttattggttcaacaaatgggtttccctattgactctattctcatgctcacagaagatgaagccagcccgcaga

SEQ ID NO: 16895 - DNA, 55 bp, Arabidopsis thaliana
  unsure at all n locations
  Clone ID: LIB25-003-Q1-E1-F4
aacttggcatctgagtngaacatcctggtgcctcttcacttctgtntgtgtactc

SEQ ID NO: 16896 - DNA, 485 bp, Arabidopsis thaliana
  unsure at all n locations
  Clone ID: LIB25-003-Q1-E1-F6
tacttcnncccggtcngtaanagtcacanattcccgggncgacccacgantccgctcaaaccctaaaataaattaaacgagttctacgtaagaaggagagagagaagaatgggtcgccaaaacattgtcgtcgtggttgccctcgtcttcatggccatcattggccttgccgcagctgcctcctctccatctccttcagcgtctccctccaaagctccagctgcctccaaaaccgatcatgtcgaggctccagtcaccgatgaccaaatcggaaccaccgatgacgatgcagctcctactcctggtgacggtgacgttgcagtggctggtcctctaggaagtgactcctcgtacgacaatgcgcctacaggctctgctgattctgccaaaagcggtgcggcagctcttggcgtctctgcggtcgtcgttggtgttacatccattgctggttctttcntgttactctaagttgggcattgtttant

SEQ ID NO: 16897 - DNA, 432 bp, Arabidopsis thaliana
  unsure at all n locations
  Clone ID: LIB25-003-Q1-E1-F7
gnttggtaatttcatccattacatggcgacttttgtttctggattcatcgtgggtttcactgcggtgtggcaactagctttagtgactctcgcggtggttccgttgattgctgtgatcggaggaattcacaccactactctctctaaactatctaataagagtcaagagtctctttcacaagctggtaatatcgtcgaacagacagtggtacaaatcagggtagtgatggctttcgttggagaatcaagagcttcacaagcttattcatcagctttgaagattgctcagaagcttggttacaaaacaggtttagctaaaggaatgggacttggtgctacatacttcgttgtcttttgttgttacgctctcttgctttggtacggtggttatctagttcgccaccatttgaccaacggtggtctcgctattgc

SEQ ID NO: 16898 - DNA, 511 bp, Arabidopsis thaliana
  unsure at all n locations
  Clone ID: LIB25-003-Q1-E1-G12
ngnnggntnnngnaangtntagcctgnncttaccggtgccaaaattcccgggaccacccacgcgtccgcacagcgccgattctccttcaaaaacttttcctaagtcgtcactttttacgatggcagaaacgaagaagatgatcatccttaagagctccgacggtgaatccttcgagatcgaggaagccgtcgctgttaagtcccagacgattaagcacatgattgaggacgactgtgccgataacggaattccacttcccaatgtcaccggagccatcctcgccaaggttattgagtattgcaagaagcacgttgaagccgctgctgaagctggtggagacaaggatttctatggttccgctgagaacgacgagcttaagaattgggacagcgaattcgtcaaagtcgatcagcctactctcttcgatctcatcttggctgcgaactatttgaacatcggtggacttcttgaccttacgtgcaaggccgtggctgatcagatgagaggcaa

SEQ ID NO: 16899 - DNA, 432 bp, Arabidopsis thaliana
  unsure at all n locations
  Clone ID: LIB25-003-Q1-E1-G2
ctcnctctctctctctctcctttgcctaaccatttcttcatcatcttctttctgcagatttctccgtttttccttgaatatgccttcaaaaaatctacaacaggcagtcctcacaaacgaattcacaaccaacttcattacgacctgtaaggactggctcgacgtaaatggtcttgctaaaggaaacttggagaagaagagagatgataatgaagaagaagagcgtctgaaaaccgagtctaaacttccgggccatgacatccacggtttcgataacgagatcaagtcattgcaacacttcttgttggatcagaaggttaggagggagttcaagagtcttgtgattgtcggagaatatggtgttgggaagacagcattatgccagaagatcttcaatgatgaagctgtgaagagtgtttaagcnccaagggt

SEQ ID NO: 16900 - DNA, 506 bp, Arabidopsis thaliana
  unsure at all n locations
  Clone ID: LIB25-003-Q1-E1-G3
nngcaattcnacttgnncgggcccggtcatcnnattaacgggtcgacncacgcgtccgagcncgtccaacctttannggagatganatgttgaagggtgtcctttttgatatcaacaacaaattccaggctgctgtngatattctccgtaaggaaaagatcacccttgatccagaggacccatctgccgtaaaacagtatgcaaatgtaatgaagaccatcangcaaacggcanacatgttctcagaatctcancgcattaaacatgacattgatactgagactcaagacattccagatgctcgtgcatacttgttgaagttgcaggaaattcgcaccaggagggggcttactgatgagcttggtgctgaggccatgatgttcgangctttggagaaagtccagaaaggacataaaagaancctctcctgaagaagttgacaagaaanggatgggattcttttggttgcanantttgnnaaaaggnaaccaaaaaagcntggggat

SEQ ID NO: 16901 - DNA, 514 bp, Arabidopsis thaliana
  unsure at all n locations
  Clone ID: LIB25-003-Q1-E1-D10
gnnnggnnnngaactgtttcgcctgnccttaccggtgccaaaattcccgggaacacccacgcgtccgtgngtttttaaanttagctggagcttgtgcatatggctctatggctaccggtttcttcgccggacacattgctgcggctctgccttccatctacaaagacggctccggctgcggagcttgcttccaggtcagatgcaagaacccgacgctttgcagcagcaaaggaaccacggtgattgtcacagacttgaacaagaccaaccaaaccgatcttgtccttagcagcagagcctttagggccatggctaagcctgttgttggcgccgacagagatcttctcaaacaaggcattgtcgatattgaatacaggagagttccttgcgattacggtaacaagaagatgaacgtgagagttgaagaatcaagcaaaaatccaaactacttggcgataaagctcttgtaccaaggaggccaaactgaagtggtanccatttacattgctcaggt

SEQ ID NO: 16902 - DNA, 492 bp, Arabidopsis thaliana
  unsure at all n locations
  Clone ID: LIB25-003-Q1-E1-A8
nnngtntactcngccccngnncggtacanagtcagaaattcccgggncgacccacgngtccgttgtccagggtttgttgttgatttcctatgcccatggtcaagagatagtgcgtttaagagaaggcatcgaggatttacgctgattagaatgaactgtgttggtggattttgatagggatcagttccgggttttgagttttggcctttggttttgtagatttcgatgatgcaaggattggatttgctatatactttgtttagtgtgtggtctgttgtgcggatagcttttggatgaataagctttgtgtgcttctttttttagtttgatttggaaagtcacagacttgacaaggatggagaaagaaggtgtgtgtgataccattaatttaagtgatcagatgtaccctgatgagcctttctgttccgagatgaaaactgaaaccattgcttcatctcagaaatttgaaggaagcgaagggaataaagtggt

SEQ ID NO: 16903 - DNA, 506 bp, Arabidopsis thaliana
  unsure at all n locations
  Clone ID: LIB25-003-Q1-E1-A9
ttgcctgcncgtaccggtccanaatcccgggnccacccacgcgtccgcagacgcgtgggcattttcgcttcaattcaataaaaggcgaaaaatctctcactgcactttatctcgagagctcagatctccgatctagagcctttcgcttctcctcttctgttcatataacaactgaataatgtcgatctccgcccaaaatccggatatttccggcgatagacaatccggccaagatgttcgtactcagaacgtgatggcttgtcaagctgtttctaatattgttaagacctcacttggtcccgtcggcctcgacaagatgttggtggatgatattggtgatgtgactattacaaatgatggtgctactattcttaggatgttggaggtcgaacaccctgctgctaangttcttgtcgagttagctgaacttcaaggatagagaaatcngtgatgggactacatctgttggtaatgtaacctgctganttgttgaagaaggnaaatga

SEQ ID NO: 16904 - DNA, 506 bp, Arabidopsis thaliana
  unsure at all n locations
  Clone ID: LIB25-003-Q1-E1-B3
nggtngnngcancttctactcgttcggggtcggtctcngattacacgggtccacgcccgcgtccgaaaaaaaacttcaatttttggggacaaagtttttatcttttcgttgtttggaatttgggggaggaagaaggaaaggtgtaaggatagggtcgtgcgtgtcaacgagaggtgctgctggacgtgaagcctcctcctccgcatcggcgaggaggcttccgtcgcagcaccacctcagcggtagccttagctcttctggctacggcggagaaccgtcggatcaatctgatatcggcggtgcgaagatgaaagggcttttcaagtctaagccacgcactcctgctgaccttgttcgacaaacccgcgatctccttctcttctccgatcgatctacctctttgcctgacctccgagattccaaacgcgacgaaaagatggcggaattaagccggnatatccgtgacatgaantcattctctacgggaacancgaancaaancctgg

SEQ ID NO: 16905 - DNA, 500 bp, Arabidopsis thaliana
  unsure at all n locations
  Clone ID: LIB25-003-Q1-E1-B4
gntnnnggnaattcnacttgntcgggccgggtctggaattaacgggtcnacncacgcgtccgatagtttgggagagagaagagaagaagaagacaccctttaagcaaaacagaggattttcattctctgttctgtttgaattattactaatctatcatcttgttgttctcttcgtcgacaatgtcgggaaacaaagaagaagaggatcctcgtatccatggaatcaaaactaagatccgtgtcgttccagattttcccaagaaaggaataatgtttcaagacataacaacagtgttgttggatccgaaagccttcaaagacacaattgatctgtttgtggagaggtacagagacaagaacatctcagtggttgcaggaatagaggctcgtggtttcctattcggtccaccgatcgcgctagccattggagcaaaatttgttcctctgcgcaaacccaagaaactacctggtgaaacaatatttgaggaatacgagttggg

SEQ ID NO: 16906 - DNA, 434 bp, Arabidopsis thaliana
  unsure at all n locations
  Clone ID: LIB25-003-Q1-E1-B8
gggaaaagttggaggaaagacttgtgcagtataaaaacaagaacgacatgcttcttcgtgaaatggtgagagatcttcaacactgggatcatttttttagtactacagtttctcctttgtgtgatcatatgaaagttccttttatctgttcaacttggtttgtttcttaattatctccccagtatgtagattaggacctactaccggtatttagcattctagactaggacttggtcttagctaacgtgaaagaatgtcatgttgtcaggacatttcagatcgctatagatgttacattacatttcattatgcctgaagatgctgtgtagttctgacatttatagaaatttgacagtctagcacagaagcccagatgagacaattgctagatgaaagatctaccttcactcaagaaagaagcgaatcnaaaaaag

SEQ ID NO: 16907 - DNA, 528 bp, Arabidopsis thaliana
  unsure at all n locations
  Clone ID: LIB25-003-Q1-E1-B9
ngnngnggtnnngnnntgtttcgccagnncctnnngggcccanaattcccgggaaccacccacgcgtccgcacaccccaaaattacaaaaaaaaaaaaaaaaaaagattttccatttccctcttctcgatccaccaccaccaccaacctcaaaagctttcatctttaccggtcatggacggtggttcaggtcaaccggcggctgatacagagatgacagaagctcctggaggttttcccgcggcggctccatcgcctcagatgcctgggattgagaatattccggcgactcttagccatggtggtaggtttattcagtataacatatttggaaacatcttcgaggtcaccgctaagtataagcctccgatcatgcctattggcaagggtgcttatggcatcgtttgttcggctatgaattctgaaactaacgagagcgttgcgattaagaaaattgctaacgcttttgacaataaagattgatgctaaaaagacctcccgtgagattaagctgcttcgtcacatggat

SEQ ID NO: 16908 - DNA, 395 bp, Arabidopsis thaliana
  unsure at all n locations
  Clone ID: LIB25-003-Q1-E1-C10
agagaaaactgcggcaatggatgatgatcacaactatgagtccaatccacatccattgttccntctcggtaatgccaatctctcctctcctgcaaatcnttggtttacataagaatnaaaaaagaaagaagaagtggcacactcttacacactttgccttgggcnttttatagtatgtttttttttggctcatctaaattagtttggattgtggttggtgcttttaatcntttttcctttaagtggggaagctttgattcattgatttcacacgaacgacaagacatatagattggntttgcctgctccgggtatatatgtctaaagnaacacnggtccaattttttttaatttccaatatnccataatantattaattaacaaaaaacnnngng

SEQ ID NO: 16909 - DNA, 504 bp, Arabidopsis thaliana
  unsure at all n locations
  Clone ID: LIB25-003-Q1-E1-C2
tggntnnngcaattcnagctnntcgggccggtctccggttnangggtccacgcacgcgtccgaagagacnttgacttcttctgatgaactttcttctgcacttcttctcattaagcctccttgttaaaataatttgagatggcgataggaaacccagaagtagcaactatggggaaggagaacactgaagccgagtcctctaatggaaacgagtctcagttaagttctgacttaacgaagagtcttgatctggctgaagtgaaggaagacgaaaaggataataaccaagaagaagaagatggactgaaagctgaggcttcaacgaagaagaagaagaagaaaagtaanagcaagaagaagaagagttctcttcaacagactgatcctccttcaattcctgttcttgagctcttcccttctggagattttcctcaaggtgaaatccaacagtacaatgatgataatttgtggngaacaacntctgaagngaaannnganangggg

SEQ ID NO: 16910 - DNA, 435 bp, Arabidopsis thaliana
  unsure at all n locations
  Clone ID: LIB25-003-Q1-E1-C4
caattcgtttaaaaatggagagtcaaaagcaagaagataatgaatacattttccgcagtttgtanccatctgtgcncattcctgacaaacttacactgnctgaatttgtgctccaaggagttgaagaatacacagagaatgtagcgtttgtanaagcggtgaccggaaaagctgtgacgtacggtgatgtagtgagggacacaaagaggctagccaaagcgttgacatctctcggactaaggaaaggtcaagtgatggntgtggtcctaccaancgtcnccgagtatgggattattgcccttggtattatgtctgccggtggagtcttctccggngcaaatccgacggntcttgtttccgaagatnacaaaacaantttaagcttccggtgctagangaatcatcactgangctaccaaagtangaannagngga

SEQ ID NO: 16911 - DNA, 437 bp, Arabidopsis thaliana
  unsure at all n locations
  Clone ID: LIB25-003-Q1-E1-C5
gcccacgcgtccgcccagagcttgattctaagaaggggaagaaggagcagaagctgaaactatctgattcggatgaagaagagtcggagaagaagaagagtaagaagaaggataagaagcgtaaggcttccgaggaggaggatgaagtgaagagcgattcaagctcggagaagaagaagagcagcaagaaggttaagttgggcgttgaggatgttgaagttgataaccctaatgctgtttctaagtttcggatttctgcgcctttgagggagaagcttaaggcgaatggtattgaagctcttttcccgattcaggcttccacgtttgatatggttctcgatggtgctgatttagttggacgggctcgtactgggtcanggtaaaacattggcttttgtgttgcctataatggaatctttggttaatggacctgccaa

SEQ ID NO: 16912 - DNA, 488 bp, Arabidopsis thaliana
  unsure at all n locations
  Clone ID: LIB25-003-Q1-E1-C7
tactcnccccgntcggtannaagtcaccgaatncccgggccgacccacgngtccggagatacaaaaccaaaactttcaagcaaagcaattcaatttcaatcaaaaaccaaatcgaagatctttgaaagtttcctttttttccgaaatctgagcttgggtattgttggataagcttctcggagattgagattgaggattttgataggtgaggagattgaaagatttggatttttgggcggcaaaaatggtgatgcagacggaagctagggttggtgtgagctcaggacatggcgtagcttcgtcttctcatcgtttaacgcaggaccagagatcacatatcgaatcggcgtcgcagctcttagccggaggactcgctggtgcttttagcaagacttgtactgctcctctatctcgtctcaccattctcttccangtgcaangtatgcacacaaatgctgcagctttaagaaagccaagcatattacacg

SEQ ID NO: 16913 - DNA, 430 bp, Arabidopsis thaliana
  unsure at all n locations
  Clone ID: LIB25-003-Q1-E1-C8
ggggttatctcaggaatggagaagatcagagtcaaagatacaccagaaggagttgtgtttgggaatttagactctgttttctcaaagatgcttcatcaaatgggtcttgctttgcctcgtgccactgctgttttcatcaattcttttgaagatttggatcctacattgacgaataacctcagatcgagatttaaacgatatctgaacatcggtcctctcgggttattatcttctacattgcaacaactagtgcaagatcctcacggttgtttggcttggatggagaagagatcttctggttctgtggcgtacattagctttggtacggtcatgacaccgcctcctggagagcttgcggcgatagcagaagggttggaatcnantaaagtgccctttgtttggtcccntaangagaanaccttggtcaatt

SEQ ID NO: 16914 - DNA, 455 bp, Arabidopsis thaliana
  unsure at all n locations
  Clone ID: LIB25-003-Q1-E1-C9
aaatatgtantgtagagagtccttgtcgagtctccagactttgaacgtagcaaagagtctcagctctttgttccctaaacaatcagctctcatcaacccgatctccgctggacgtcgaaacaacctgcctcgtccaaacctcagaagacgatgtaaggtcaccgcttcacgggctaatattgaacaagaaggtaacacagtgaaagaacccattcagaatattaaagtaaagggatacataacggcccaagaagagtttctggagggcataacttggtcgagaggtctcgatgacattgctgatatccgcggcagatcattgctcgtcgagcttattagcgccaagactgaccagcggattacggtagaagactacgcacaacgtgtatgggccgaagcccctgatgagaagtacgantgcgagtttgagatgcctgaagactttggnccantgg

SEQ ID NO: 16915 - DNA, 499 bp, Arabidopsis thaliana
  unsure at all n locations
  Clone ID: LIB25-003-Q1-E1-A5
ggntggngcaattcnagctgnncgngcctgcntagacnnnaagcccgggncgacccacnngtccnaccacgcgtccggttctagtctcgtctccatcttcattcttcggttcaccgttgattaaaccgtcgtcatctctccgtcacagtggagtaggaggaggaggaaccgctcaatttcttccataccggagtaataataacaaactcttcactacttcaaccaccgtacgattcagcttaaacgagattcctcctttccatggcttggattcatctgtagacatcggagcgattttcaccagagctgaatctcttctctatacaatagctgacgccgccgttgttggtgctgattccgtcgtaactactgattcatccgccgtgcagaagagtggtggttggtttggttttatctccgatgctatggaattggttcttaagattttgaaggatggattatcagcggttcatgtaccttaagcttatgggatttgcga

SEQ ID NO: 16916 - DNA, 69 bp, Arabidopsis thaliana
  unsure at all n locations
  Clone ID: LIB25-002-Q1-E1-G12
ntcaagtccttactacttgccatctaccaatttcatagatacttccaaagcacttcagctcaannctag

SEQ ID NO: 16917 - DNA, 499 bp, Arabidopsis thaliana
  unsure at all n locations
  Clone ID: LIB25-002-Q1-E1-G4
gggnngnacttctactcnncggggtcggtcacngattccacgggtcnacggcncgcgtccgntcccnaagaaggttgttgttcacaaggatggtccaagaggagtccatttcaggcgtgctggtccacgtcaaaaggtttactttgagtctgacgaagtgcatgcttgtatagttanatgtggaggtctctgtcccggtctcaataccgtgattagagaagttgtgagcagcttatcatacatgtatggagtaaagagaattcttggaatcgatggtggatacagaggattttacgccaagaatactatccccttaaactctaaagtcgtgaatgatatccataaacgcggaggaacaatcattgggacctcaanaggtggacatgataccaacaagatagttgatagcattcaaagatcgangaatcaatcangnttacattattgganggagatggnaccagccaagtgcntcagttatatttgagggaaattagaa

SEQ ID NO: 16918 - DNA, 91 bp, Arabidopsis thaliana
  unsure at all n locations
  Clone ID: LIB25-002-Q1-E1-G5
cctatcanttgcctatcaaatgcccttgactatcgattataaccttcngtctccgggagaaangaaaattcctcggaattttaaacctaga

SEQ ID NO: 16919 - DNA, 83 bp, Arabidopsis thaliana
  unsure at all n locations
  Clone ID: LIB25-002-Q1-E1-G6
cagatnatgtgtccatctacttgtccaaagttcaagcctttcccttagcttgaagtctcgatcttcgtcaannaaaaaggtta

SEQ ID NO: 16920 - DNA, 419 bp, Arabidopsis thaliana
  Clone ID: LIB25-002-Q1-E1-G7
gccatttgaaaggattgaagtgacgaaggatcaggcactcgagatgttttctgagaataattttaaggttgaactcatcaatggtttgcctgcagacatgaccattactgtctacagatgtggccctttggtggatttgtgtcgtggaccgcacataccaaatacttcctttgtgaaagcgttcaagtgtttgagggcctcatcagcttactggaagggtgacaaagaccgtgagagcttgcagagagtttatgggatatcttatcctgatcagaagcagctgaagaaatatctccaatttctagaagaagccaaaaagtatgaccacagactattgggccaaaagcaggaactcttctttagtcatcaactcagccctgggagttatttcttccttccactcggcactcgtgtataaa

SEQ ID NO: 16921 - DNA, 53 bp, Arabidopsis thaliana
  unsure at all n locations
  Clone ID: LIB25-002-Q1-E1-H1
tgaatttgtcacatccttaagcattnattggcatgatgatngccgtaccttgt

SEQ ID NO: 16922 - DNA, 493 bp, Arabidopsis thaliana
  unsure at all n locations
  Clone ID: LIB25-002-Q1-E1-H10
nnnnnnnaangttagttgccggnncggtacaancagangggnccagnccacncacgcgtccgantttctgggttccttctgcttcgtccaagttagtcgccggagacgacaaagagcacctgaattggtgcgagaaaagattcctacttctgagaccatcttcacaaacgtgtagcaaagacgaagcctttgagttttctctttctgttacttagaaaatagctgattttgaacctggagctgagttccgtgtgtgattacttaattcggttatggctgcaccaaacgttcgtagtagtagcagcttctctcgcaacatatcagttgtgtcatcgcctcaaattcctggtctcaaaagtggtcctaatgggcacagcttttatatcgtcagggattcgtgatcttgacaggatactaaggtggtgggtatcctttgggaagcttagtaatggnaatgggaaattctgaaagcaccgcatcatatggatctggt

SEQ ID NO: 16923 - DNA, 424 bp, Arabidopsis thaliana
  unsure at all n locations
  Clone ID: LIB25-002-Q1-E1-H11
ctctctctcacacacaactgtactctctctggagatttgaagaaaaccctaattcccaattttcttttgtcgttttccttctcngacgattgagagttttcctagatctaaagaaaaaagtttcaancttcactatgcaatactgagaagaaattccacaaggaaaaaaaatgtcaagctccgacccgaaacccggacctaaaccgggtccatggccaccaactccagaatccgccgcaatgccaccgtcttcctgggctaaaaaaaccggatttcgtcccaaattctccggtgaaactaccgccactgattcctcttccggtcaagctctcaataccgggttaagaagctaaacaanaagaaacccaaccgggattgtgaagctggtcaaaccaagaatccggtcctcntcctcctgtctccg

SEQ ID NO: 16924 - DNA, 507 bp, Arabidopsis thaliana
  unsure at all n locations
  Clone ID: LIB25-002-Q1-E1-H2
nnnnngtaacttcnacttcnntcgggtncggtaacagncanagggtcgangnacgcgtccgaacgatatcgtcgcctcttctcgtctctccgctctcctcgccgcgagtctgtttcgccgccgtctatctcccaattccgtgaccgttgttgtttagtgaatcgatgatttacactgctatcgacaatttttacctatccgacgagcagctgaaggcttcaccttcgaggaaagatgggatagatgaaacaactgaaatctctcttagaatctatggatgtgatctcatccaagagggtggaatattgctcaaactaccacaggcagttatggctactgggcaagttctgtttcaacgattctattgcaaagaagtccttggctaaatttgatgtcaagataattgctgccaactgtgtatgggtttgcatcaaaactggaagaaaaccctaaaaaaagctagacaggtcaatcaatcgtaatccaaaaggatggaattgtcccagg

SEQ ID NO: 16925 - DNA, 435 bp, Arabidopsis thaliana
  unsure at all n locations
  Clone ID: LIB25-002-Q1-E1-H3
gtaatggtgctaagctttatttgccctgaggaagctgaaagccctggatctaagcgataatgaattttcaagctcagtggaattgcaagggacttgcccatggaaanatatggaagagctcaaactcagtaacaacaaactagctggtcagtttcctctatgtttaactagcttgactggacttcgagttcttgatctttcatcaaatcaattgactgggaacgtaccctctgctctcgctaaccttgaatcccttgagtacctatcactgtttggtaacaacttcgaaggcttcttctcacttggtttactcgccaacctctcaaaacttaaggtgctcaaacttgattcacaatccaactcacttgaanttanantttgaaacgtcctgggaagccaaaattccaanttggtaattaattgcgcnacnatttt

SEQ ID NO: 16926 - DNA, 502 bp, Arabidopsis thaliana
  unsure at all n locations
  Clone ID: LIB25-002-Q1-E1-H4
nnnnnngnaattctagctgntcgggntcggtaacagtcngnaggcccacgggccgcctacgngtacnantccgggcancgcttgacgaatcattcatcaacacacgcanagagctctgaatctcgaggaagaagatggtgaggatcattcctatggctgcttcctccattcgaccttccctcgcctgcttctctgattctcctcgcttccccatctccctcctctccagaaatctctctcgcactctccatgttcctcaatcacagctttttggtttaacttctcataagcttttgagaagaagtgtaaactgtttaggagttgctgaatctggtaaagcaagctcaagctactacacaagatgatcttctcaactgggttaaagaatgataagaagaagaatgcntcatgttgtttatcgtgttggcgaaattgaacgggacgataaagtttatactgaatgtcctgggatgaagcttcacnttagcgtgatataccaaaa

SEQ ID NO: 16927 - DNA, 437 bp, Arabidopsis thaliana
  unsure at all n locations
  Clone ID: LIB25-002-Q1-E1-H6
gaatcctcaccgtgtcatcagaggccctgtgtttactgttggacgccggggatgtgatttatctatcagagaccaagctatgcccagcaccctctgtgaactgaagcagtctgagcacggtggtccatcagttgcatcccttgagatattaggaaatggagttattgttcatgtcaatggcaagtgttaccagaaaagtacttgtgttcatctacggggtggtgacgaggtgatcttcagccttaatgggaaacatgcttatatatttcaacctgttaaagatgaaaatttagcagctcctgacagagcttcttcgttgagtatatgttgaagctcggggtgcccctctgaaaggggttcatgtcgagacaagggcaagganatgttgatggggnctcaaatgttgatgggggcctcctatantgggatcctctatc

SEQ ID NO: 16928 - DNA, 486 bp, Arabidopsis thaliana
  unsure at all n locations
  Clone ID: LIB25-002-Q1-E1-H8
ancttgcccgtgccggtccaaanncanaaaggcccggggcccanncacgcgtccantcatctgccaccaaaccaaagacataatttcttcggtgacttccatggctccgcctgtctctgatgattccctacagcctcgagatgtttgtgttgtgggagtggcgcgaacgcctataggggacttccttggctccctctcgtctttgactgctacaagacttgggtccatagccatccaagccgcacttaagagagcacatgttgatccggcccttgtggaagaggtcttctttggcaatgtcttaactgccaatcttgggcaagcaccaccaagacaggctgcacttggtgctgggattcccaatncngtgatctggcaccactatcaacaaantttgtgctgcaggaatgaaatctgtaatgcaancgtccaaaantancaactcggcttgaatganattgttgttccnggtgggatggaaacatt

SEQ ID NO: 16929 - DNA, 78 bp, Arabidopsis thaliana
  unsure at all n locations
  Clone ID: LIB25-002-Q1-E1-H9
atatacgagatggttanagacaacgaagacangatctgcaatgctctgtttcaacgatttgggcaaacacagtactga

SEQ ID NO: 16930 - DNA, 412 bp, Arabidopsis thaliana
  unsure at all n locations
  Clone ID: LIB25-003-Q1-E1-A1
aagattggaagaaattttaatggtgtacctgaaactgctgatatgttcttccttagaagacttagccctgttgagtccggttgttgcaagccaccaacagattgcggtttttcatatgtgaatgagaccggatgggacacgagaggagggatgataggaccgaaccaggactgtatggtgtggagcaacgaccagagcatgctctgttatcagtgtagttcttgtaaagctggtgttcttgggagtttgaagaagagttggagaaaagtatcggtgatcaacattgtggtacttatcattctagttatcttttacgttatcgcttatgcagcttataggaatgtcaagaggatcgataacgatgaaccggctggtgaanctaggatgacaaaatcacatcctaatcatttcc

SEQ ID NO: 16931 - DNA, 436 bp, Arabidopsis thaliana
  Clone ID: LIB25-003-Q1-E1-A12
ggggaagatgaggttcttgttaggagaatcaatgggaggagcagtgcttttgttgttacacagaaagaagcctcagttttgggatggggctgtcttggttgctccaatgtgtaagattgctgaagaaatgaaaccaagccctttggtaatttcgatattggccaaacttagtggagtgataccttcgtggaaaatcatccctggccaagatatcattgagactgcttttaagcagccagaaatcaggaaacaggttagggaaaatccctactgctacaagggacgtccacgtttgaagactgcttatgagcttttgagggttagcaccgatctcgagaagaggcttaatgaggtttcattaccgttcatagttttgcacggtgaagacgataaagtcacaagataaagcggtgagtcgacaactgtatgaagttgc

SEQ ID NO: 16932 - DNA, 497 bp, Arabidopsis thaliana
  unsure at all n locations
  Clone ID: LIB25-003-Q1-E1-A4
gtggntggngnaattcnagtnntcggccggtctgcaataacgggccacccacgcgtccnantattttttctgatctgagaaaaaaaatggcgaatggagctaatagagtggatctcgacgggaaaccgatacaaccgttgacaatatgcatgatcggcgccggaggtttcatcggttcacatctctgtgaaaagctcttgaccgagacgccacataaggtgcttgcgctcgatgtttacaacgataagatcaaacacttgcttgagcctgataccgttgaatggagtggtcggatccagtttcatcgtatcaatattaagcatgattcgagacttgaaggtcttgttaagatggcggatctgattataaatcttgctgcgatctgtactccagctgattacaatacacgtcctcttgatactatctacagcaatttcattgatgcgcttccagttgtgaaatactgttctgagaacaacaagcgtctcattcaattt

SEQ ID NO: 16933 - DNA, 431 bp, Arabidopsis thaliana
  unsure at all n locations
  Clone ID: LIB25-002-Q1-E1-G1
caagttcttttttttttttaaccttgccatcaatacaaccatggcaaggatttctctgttattctctttagccttagttctagccatcgggtccgtcttggctcacccacctacccacaagaaattacaaaagaccttgtgtccatctactttgtccaaagttcaagctttcccttaccttgaagtctctagcttcgtcgagaagaaggttcagttcgcaccaaaaaccattgcgttcaagtctttgttctccatctgcaagagctacatcgactttcttgggggcgttaagttttctgcctccagagatgtgtttcacgtcgttcatgtcaaattcactttgatgaccaaggcgatggttattgcacaagcacacattgggagttgaaggaganctcgctgttaagttgggcaaaagctacaccgtgatg

SEQ ID NO: 16934 - DNA, 462 bp, Arabidopsis thaliana
  unsure at all n locations
  Clone ID: LIB25-001-Q1-E2-D3
agcagccacctccagcttccaacggtgctgcaacagggccagggcagattccttccgaccaacaagcttacctccagcagcagcagtcgtggatgatgcagcaccagcagcaacaacaaggtcagccgcctgcaggatggaatcagcagtctgcaccgtcttctggtcaaccacagcagcagcagtatggtggtggtggatctcagaatccaggatcagctggtgagatccggtccctgtggatcggtgacttgcagccatggatggatgagaactatctcaaattggggaacgtctttggtcttactggcgaggctacagcaactaaagttattcgcaataaacagaacggntattcagaangttatggcttaatgaatttgtgaaccatgctacagctganaaggaatttacagacttacaangggtgctcccgatgccgaacaatnaacaaggccttca

SEQ ID NO: 16935 - DNA, 464 bp, Arabidopsis thaliana
  unsure at all n locations
  Clone ID: LIB25-001-Q1-E2-D4
agctgcttgtgttgtatgcctctcagaccggaaacgctcttgatgcggcggagcgtattggccgcgaagcagaacgccgtggactgccagcttctgtcgtctccaccgacgaattcgacacgagttccttacctcatcatgaggaggctgttgtttttgttgtctccactacagggcaaggagactctcctgattcctttaaggcattttggaggtttcttcttcaaagaaatctgggaaactattggttgcaacaagttcgctatgcagtgtttggaacccttnaaggtgattctggttaccagaagtacaactttgtagcaaagaagctagacaaaagattatcaagatcttggggccacaaccatcattgaaaaaggtctaaggagatgatcaacacccatcaagggtatgaaaggaactcttggatccgtggatgccttccttggtggaaggacattata

SEQ ID NO: 16936 - DNA, 479 bp, Arabidopsis thaliana
  unsure at all n locations
  Clone ID: LIB25-001-Q1-E2-D7
ggcaattctcaactggctcagctacattcctgcttacgtgggtggtcctcttcctgttcttgcccctttagatccaccggagagaattgtggagtatgtcccagagaactcttgcgacccacgagcggctatagctggggtcaaagacaataccggtaaatggcttggaggtatctttgataaaaatagtttcattgagactcttgaaggctgggcaangacggtagtgactggtagagccaagctcgggggaatacccgttggagttgttgcccnaaaggccttgngacacagactgtcatgcagatcatcccaagcccgatcctggacagcttgactccaagaaaagnantggctccgcaagcaggggaangtctgggttccntgatttcancgggccaangaactggntncaannccgcttaatgggattgggnaacccgcggaaaaanctttccaattggnttaaccgcangcgg

SEQ ID NO: 16937 - DNA, 458 bp, Arabidopsis thaliana
  unsure at all n locations
  Clone ID: LIB25-001-Q1-E2-E1
ggtcaatccaagatgggtcacagagtattggtttatgttggagctctgtttctgattttattcacgatttttccatcttctagtgctttaatttcgtctcctgatgctaatcctccttaccctaaagctatctccgatttgaaggaatcaattgtgaagggacttggattccaatccgaggaagtcaaggtttctgggtttgatataagggatgcattggtaggacattctgtttcatacgaatttgatttagaaatcgacaataaagtttcccttcccccatttaagcctcctgaaagatgtgaaccgatgggaatacgttgatctccnaattttcaangtagaacaaccccctgagaatggtttgggttccaaangaggaacaagaagaacatccaattgatgaagtgttaaccggtnttaaccnccnntttcaaactttcggggcccaaaggnaa

SEQ ID NO: 16938 - DNA, 428 bp, Arabidopsis thaliana
  unsure at all n locations
  Clone ID: LIB25-001-Q1-E2-E11
ggttctcatctttctctctaagagattttgtaggtgacaatcaaaagtttgacaaaatggtgaagtttacagctgatgagcttcgaaggattatggactacaaacacaacatcngtaatatgtctgttattgctcatgtcgaccacgggaaatccactcttactgattctttggttgctgctgctggtatcattgcccaagaggttgctggtgatgttcgtatgactgataccanagctgatgaggctgaacgtggtatcactatcaagtccactggtatttctctctactacgagatgactgatgaatccttgaagagtttcactggngccanagacggnaacgagtacctcatcaatcttattgattcacctgggcacgttgacntttcctctgaggttactgctgctctccgtantactgatngg

SEQ ID NO: 16939 - DNA, 507 bp, Arabidopsis thaliana
  unsure at all n locations
  Clone ID: LIB25-001-Q1-E2-E12
nnnnnnggactgntacgcctgccntttaccggtgccaaaattcccgggaangacccacgcgtccggcaaaagtcatttaactttcctaaaacaatggctttaaaacatatgcaaatctttctcttcgtcgctatattttcatcattctgtttctccatcactctttctcgtccactcgacaatgaactcatcatgcaaaagaggcacatcgagtggatgactaaacacggccgtgtctacgcggatgtgaangaggaaaacaatcgctacgttgtgttcaaaaacaacgtcgaacgcattgaacatttaaatagcattcctgccggaagaactttcaaacttgcggtaaatcaagtttgctgatttaaccaatgacgaatttcgttccatgtacactggtttcaaaggtgtctcggcattatctagccaaagccaaactaaaatgtcgccgtttaagtaccaaaacgtttcttcnggggccttgccggtttccggttggctnggagg

SEQ ID NO: 16940 - DNA, 479 bp, Arabidopsis thaliana
  unsure at all n locations
  Clone ID: LIB25-001-Q1-E2-E3
aaattcgcattttctctctcgccggagagatgcaacggtttcttctacctttactcttccttgcactatcgccgccggcgatttgtcattactcttcctcaacctcttcaccttcttcgtcctccgtttcttccgacgcctcagaatggcgtccagctcgagccacctactacgccgctacgaatcctcgagacgcggtgggcggtgcgtgtggatacggagatctcgtcaaatctgggtacggtatggctactgttggtctaagcgagactctgtttttgggaaaagccgtgggtcaagattcngtggtgctggtttcgagctcanangtgttgatgatcccngttggggggtanccctgaaacttcaatnaaaacccacggctaccaaattttngggngccccnnaatttaggggtttggattcccaaaggggggggggggacaatgggnaanccnaccttaagaaannnttngggg

SEQ ID NO: 16941 - DNA, 432 bp, Arabidopsis thaliana
  unsure at all n locations
  Clone ID: LIB25-001-Q1-E2-E6
tttcttttacgcgtatcccttttcaatatacatatatatatacagagctaganaagttgcaaaatcctgtgttaatcatattacaatctgcattgtgaaattttgcgaattcatctagggtttgatctgactccaaatttgggatttttagggtttaaatctacagatatagagaganagagaatgggaggttgtttatctggagatgtgaaaggaggcaaacaanccantggaggggtccancatagacccacttcctcaaccatcccggnccccaacaatgcggctcacaacgacgccgtcgattttttcttcacatcncntggtcaatatcntctcttttctcaaatcgagttaactttgtcgngcttcnganntgttgcnctgtcacagaancatccaaggattagnngnggncnctgtcnanctatt

SEQ ID NO: 16942 - DNA, 442 bp, Arabidopsis thaliana
  unsure at all n locations
  Clone ID: LIB25-001-Q1-E2-E8
gtcaaattttattacaaagagggagaccagaatattcctccttttgtcttcaagattttaaagccatggccggtggagctcttaccgatgaaggaggcctaaagagagctcatctctatgaacatcggatcacttcttacttcatcttcgcttgcatcgtcggatccatgggaggctctcttttcggctatgatcttggagtctctggtggtgttacatcaatggacgatttcttgaaagagttcttcccagggatctacaaaaggaaaaaanagcaaatgcatctaaacgaaacagattactgcaaatacgacaatcaaatcctcacactcttcacttcttctctctacttcgccggtttaatctcaactttcggagcttcttacgtcancagaatctacggtaggnggggaacatcctcgttggctctgtcagcttcgtc

SEQ ID NO: 16943 - DNA, 146 bp, Arabidopsis thaliana
  unsure at all n locations
  Clone ID: LIB25-001-Q1-E2-E9
cggatccaaaaaacgcncgttatataaacgcttaanttctcnaggattcntcttctgcttccgccattgctcgaaaatcgcgtcttctgacaatgtgctgaaactgagtcatcgtccgagttancaaagtgaaacttcgaantttc

SEQ ID NO: 16944 - DNA, 329 bp, Arabidopsis thaliana
  unsure at all n locations
  Clone ID: LIB25-001-Q1-E2-F1
ngntcctgnncgtactgccggactccgggtcgaacacgcgtccggttctggttacctgacactggtggacaggttgtttacattcttgatcaagttcgtgctctggagatagagatgcttcaacgtattaagcaacaaggactcaacattaaaccaaggattctcattctaactcgacttctacctgatgcggtaggaactacatgcgngtgaaacgtctcgagaagagtttatgattctgagtactgtgatatncttccgggtgcccttcacaacaanagaaagggtattgttcncaantggattnccagggtnccaattcnggccaa

SEQ ID NO: 16945 - DNA, 56 bp, Arabidopsis thaliana
  unsure at all n locations
  Clone ID: LIB25-001-Q1-E2-F10
gcnttgagaggaactggttgaggagagattttaacgtggtangatttgggctggat

SEQ ID NO: 16946 - DNA, 429 bp, Arabidopsis thaliana
  unsure at all n locations
  Clone ID: LIB25-001-Q1-E2-F3
caagattgatatgcaattgnaactttcatctgcagcaaaccaatcttccgtaggggcttctgagcctagtcaaccaacgagaggtatacatgttaatccaaaatatcttcgcaggctggagccctcagccgccgaaaataatttgagaggaattaattcnagtgcaagagtttatggccaaaattcactcggtgggtataatgatttcgaagatcagttagagancccatcttcactgtctagttaaanccaccaagatggttttaccaangaggtctaatgatggntctaatccttctaatcaagcttttaactatggaatgggtcgagctactagcagagatgatgnaacatatgggaatgggcgaangaaaaggnaaacntaggccaaggaaatgatcacgaagagacctanangcgttganagat

SEQ ID NO: 16947 - DNA, 468 bp, Arabidopsis thaliana
  unsure at all n locations
  Clone ID: LIB25-001-Q1-E2-F5
atgacattatggcagaagtttacaaaaatggacctgttgaggttgccttcactgtttacgaggactttgcgcattacaaatctggagtgtacaagcacataacaggtactaacattggaggtcatgctgttaaacttattggctggggaacttctgatgacggtgaagattattggttgcttgcaaatcaatggaaccgaagctggggtgatgatgggtacttcaagatcaggagaggaacaaacgaatgtggcattgaacatggtgggttttntgtanctgggnttaccttcagacanggaacgtagtttaaaggtattactacttcaaatgatctcctgtttccccaattttaaacanggaatatgttgtcccccaactcctggttatacataaatttcccaactggtggttgttggnttacccaggngaaatanaaacgacctttcaancccaanagagggaatt

SEQ ID NO: 16948 - DNA, 449 bp, Arabidopsis thaliana
  unsure at all n locations
  Clone ID: LIB25-001-Q1-E2-F8
gcccacgcgtccgatttggtcacgtgagctgcgtcatgccgttaacggaagagaatgtggagagagtgttagacgaagtacgaccatctctaatggccgacggaggaaacgtggcgttgcacgaaatcgacggacttgtggtggttttaaagctacaaggagcttgtggttcgtgtcctagctcatcaatgacgttgaagatgggaatcgagagtcgtcttcgagacaagattccagagatcatgtccgttgagcagtttcttgaatccgaagnnaaaccaggaggtttagagctgaacgatgagaacattgagaaggttctctctgagttaaggccgtacctatccggtactggangtggggggcttgagttagttgagattgatgggttacgtgngcaaggttcgactcacnggggnaactgctggantcatgactgttccgtgtcg

SEQ ID NO: 16949 - DNA, 458 bp, Arabidopsis thaliana
  unsure at all n locations
  Clone ID: LIB25-001-Q1-E2-D2
aacgacatcggagacttgagagcggcggcgagcttcaccggcgctggttaacggcggccctctcaatctccagtattctcggttcaataaaagcttcaaaaaaagaagaaaaaatcgaaaattcacgaaaatatatattaatttcaattttccatatttgaattcttccagatcttatggttccttgttcttcgttctcgtggcggtttttgaattgttgatgcgacgatctcatgcccgttctagggtgaagaatagtagtagtagtaaatccgattaaattggggggatccgattaanttccagatccgttctgggaaccgagcaacgtcttcttcancgacctatacgctaacaaaaccgaaattcgaaacacgcgaaaatcgaatctcttggttaacagttggttctanatctgtagtgttgggggttcccttctttgctaatcaaatttgttc

SEQ ID NO: 16950 - DNA, 431 bp, Arabidopsis thaliana
  unsure at all n locations
  Clone ID: LIB25-001-Q1-E2-A8
aacgacatcgctcccggcggtcaattaactacaacaaccgacgtcgaaaacttccctgggttccctgaaggtattctcggtattgatatcgttgagaaattcagaaaacaatcggagagatttggaactacgatcttcacggaaactgttaacaaagttgatttctcatcgaaaccgtttaagctattcactgattcgagaactgttctcgctgattctgtaatcatttctactggagctgttgctaaacgtcctttttaaancttcactggatctggtgaangtaatggtggtttttggaatcgtggtatctccgcttgtgctgtttgcgacggagctgctccgatttttangaataagcctcttgtggttattggctggtggtgattcagctatggangaagcgaanttttctgactnagtatggntct

SEQ ID NO: 16951 - DNA, 433 bp, Arabidopsis thaliana
  Clone ID: LIB25-001-Q1-E2-A9
caaactggccggcacatgatttgcatcagggcattggaatggattgggattcgatcaacgatttgagggttgacatgggtagaatacagcaaaggatggataacctgcagaggatgctagaggcttgcatggaaatgcaactcgagttacaacggtccataagacaagaggtctctgctgcgatgcaccgctctactgaccaaccaggtccatccaaggacactgcgagttacgagtcaaaatgggaatatgtaaggaaagggatctgctgcgtatgctgcgagagcaatattgactctttattgtatagatgtggacatatgaacacctgcgagaagtgtgcaaagaagctagtggaagcgggaggaaaatgtcccatgtgtcaagcccctgtgattgaggtagttcgtgcttactctattctttgaaactc

SEQ ID NO: 16952 - DNA, 406 bp, Arabidopsis thaliana
  unsure at all n locations
  Clone ID: LIB25-001-Q1-E2-B1
aaagaaaagagagagaaaatgtcgtccagtaaatccaggtacgagggcagccacttcttagggttccggcaagaaaccaccgtatgacacacttggttgtttgcggcgtttccacaaaacgccaccaccgtgaaatcaatgcactcagcagtaatagtggtccatcgttggattcggtcccaacaagaaccgacaagaggcagtttcttcgtggtgacggtaacggtaaattcgggaagttcggtgggaaatttgtaccggaggaaaacccattgatgtctccctgatagaacttgaagacaattacttgttagtgcatnacaattcaggagactacaagcgttagaacactaggagagaacgctctcactcgcgactcgaacgacacacagacatantcaacacg

SEQ ID NO: 16953 - DNA, 438 bp, Arabidopsis thaliana
  Clone ID: LIB25-001-Q1-E2-B10
ggttttagcttagggaagcttctagatctctccgatgatcccttgtggacaactggatggatttatgttagggtgcagaaccaacttgcatttgtatataacggtcaggttgtcgttgacacttcattgtctctaaaaagtcgtgattatagtcacatcattagcgttaaaccgcttgctatagctgcaacggagaaggctcaatttacagttaaaggcatgaatctccgtcagcgtggcacaaggttactttgttctgttgaaggaaaatacttgattcaggaaacaacacacgattcgacgaccaagggaggatgacgatttcaaggacaacagtgagattgttgagtgtgtaaacttctcttgtgatatgcctatattgagtggtcgaaggattcatgggagattgaagaccaaaggactcagtagcaacttctt

SEQ ID NO: 16954 - DNA, 416 bp, Arabidopsis thaliana
  unsure at all n locations
  Clone ID: LIB25-001-Q1-E2-B12
atcgaaacgaagaatcatttgaagaagaagaagatcgtgagaagcttaatgggttggatcccgtgttctgggaaatcgagtgggaggaataagacaaggaggaacggtgaccacaaactcnacaggaagtcttctgattgttctgtgtctacttcagagaaatctanggccaagtcgtccttgagtgaatccaaaagtaaaggctctgatcacattgtggcacaaacgtttacattctctgagttagctactgccactagaaacttcagaaaagaatgtcttataggagaaggaggatttggtagagtttacaaaggatacttggccagcactagccagacagcggctatcaagcaacttgatcataatggtttacaaggaaacanggagttcctcntcnangttccaagttgagt

SEQ ID NO: 16955 - DNA, 436 bp, Arabidopsis thaliana
  unsure at all n locations
  Clone ID: LIB25-001-Q1-E2-B5
atatcgacgtgacatggtgtcaatatttcactcctaaatttcgtggtactcacgtggacgttgaggtaaagggtaaaagggtaatgaagcttctgaatcatatagagacttatgagatggaccaaccgagactaataatgagattcttaccggcgccgggagcttactgggccggaaaagtgaaaataaagtgtccggagactgatctcgaagctgagttacatttgatctccgattcattcattgaaagattcagaaagggggggcatcaacaccagatcaatanaaggaaagtctttgaatcttcctctggtaacagctctacaacatttttggccattgggacagaacggtaatggccgagtatataaagactgggtganctccnaggtcatttacagngccaanggggaatttcacaggactcaaacctcca

SEQ ID NO: 16956 - DNA, 457 bp, Arabidopsis thaliana
  unsure at all n locations
  Clone ID: LIB25-001-Q1-E2-C1
gggaaaaagatccttctccttcctcctccttccctcctttccttcaacacaaactcctctcaattctaactcctctggttttttttctttaatcataacatttttttgaagaacagagattctttttgtttgtgtaagagatgggaaattgtcaagcggttgatgcggctgcgttggttctacaacatcctgatggcaagatcgatagatattacggtcctgtatccgttagtgagatcatgcgtatgtatccctggtcactacgtttcncctaataatcctttggcccccccgggagaaagaatattcccggggacaacaacaacaacagtgataagangaganaaagggtgtaaggtcaaccccgtgaaacttcccgacaaagggaaanctggacttggcaangcttaacgccccancanttggaaaaaggtntgaanggttaaaanccaanatt

SEQ ID NO: 16957 - DNA, 412 bp, Arabidopsis thaliana
  unsure at all n locations
  Clone ID: LIB25-001-Q1-E2-C11
cgttcaagaagcgatgttcttggatctggtactggaacttanggacatggaactataatgcgaggaggtggtanatctccggccaaacctaccaacaccggnngaggatccaactcgccggtaaatgtcggtaactctagtataagtantantactgttgctacgggagagactcctatatggaaaaaagcgattttaggttccggattcagaggaagtnaanagagtacggaatgaaatgtataaggaaaggtttgtttaatgaggctttgaagttntatgatagagcantaactttatctccgactaacgctgcttaccggagtaatcgagctgccgcattgattggnttgtctcnaattggtnaagctgttaaggaatgtgaagatgctgttagattcngntcnaacat

SEQ ID NO: 16958 - DNA, 463 bp, Arabidopsis thaliana
  unsure at all n locations
  Clone ID: LIB25-001-Q1-E2-C3
ccaagaaaaacaanaacanaacaagagtctcattatctctctaattctaaagatggagaagaatatatcaataagcaagaagctagggaacattgtacgttttgtcttgtacatgttacacaaaggcatttctaagcaaaagctcctagccgactttaatgccactctcaaacgcggcaagaatctcatgttccacaaccgccgccgtgtcccaggctcggctgttgcgtcccatccacagaacgagtacgagtttagctgcagcgacactcctaactacaacccgggntntccccttcaacatggctgccttcaagaagaagagccaccacaacagcctcttctcctgtggtcaagcgccaaccgacccttgatgacgacacttccgtctccagagccgttctaaaagctgctcaacagcggtggngatcatgatcagggaagtaacacgcccggctttttc

SEQ ID NO: 16959 - DNA, 456 bp, Arabidopsis thaliana
  unsure at all n locations
  Clone ID: LIB25-001-Q1-E2-C4
agctcttattgcttccacttccttcttcgtccccatctccaactcttcctcctcacacattatcaataacagattcttcccttcattttattctcccaacttaaatttcgggacttttcggaaaacttccttgtcatcatcacacctcgtcttctcatcttctgcaatttccgcaccgccttcttctactgttcttactcgaaacagctattggatggtgttattggataaacctccgcattgggtttcttccaaatcagccatggtagattattatgggtttnccgagattcttgcgaaagtactgggaaacgaaaaagatgcgcaagtgagtatatatgatgcttcctttgatacccatttcgggttttgttgtcatatcgacgaagatgcttcacgacagctcgctagtttacctggagtagtgtctattagacctgaacaaggattacagtt

SEQ ID NO: 16960 - DNA, 313 bp, Arabidopsis thaliana
  unsure at all n locations
  Clone ID: LIB25-001-Q1-E2-C5
acnccaccaaatcgaaccagcaccgtatcgtcaagactccangaggtaaattggtgtatcaaaccacagagaagaganctantggccccaaatgtcctgttactggcaancgtattcaangaatccctcacttgangccctctgagtacaataggtcnagattatcaagaaacaggacgactgtaaaccgagcatacggtggaaggtttcccttgtctggttctgcantcagggaaangatcattcgggcattccttgtcnaacagcaaaagattgtgaacaaagtgttgaaactccnanacgctaangagna

SEQ ID NO: 16961 - DNA, 87 bp, Arabidopsis thaliana
  unsure at all n locations
  Clone ID: LIB25-001-Q1-E2-C9
ccctncaggactatgaaacttcangttcggtaagtttgtgatctttgatgggcccacacgcncatggacaagaactacctctcanaa

SEQ ID NO: 16962 - DNA, 458 bp, Arabidopsis thaliana
  unsure at all n locations
  Clone ID: LIB25-001-Q1-E2-D1
gatttttcggtgggttgtgttggcttctgatctaggaattgacgctagacccttcttgacgagaagcgatgacgttgatgaacaagaaaactggcatgattgtccccaatacttaggagatgaagatttctctgatctcgatcttctccagttctttactctccagggcttggataggtccggtaaccggattttccgcatcgtcggaaagtatttccctgctcgtgtagtgagtgcggagcggctgaagaagtatatatcccagaagataagcaaccaaaaaatttgtcctgagggacctttgtgcttggtttacatgcatagcacagtccaaaaggacgacaattcaccgggaattaccatcttacggtggatttacgaaggaccttccttcagatatcaaagacaggcttcaacttgttgatttcatccancctggtcttcgttcaaagacttgt

SEQ ID NO: 16963 - DNA, 333 bp, Arabidopsis thaliana
  unsure at all n locations
  Clone ID: LIB25-001-Q1-E2-D10
ggaactgtttacgccngccctttaccnggnccaaaattcccgggaaacactcacgcgtccggggttttagttgncgcacgaggaggaaaaatgccancgggtcatggagttcgggcgagaacgagggatctgttcgcgaggccattcaggaagaagggttacattccactctcgacttacctgaganccttcaaggtcggcgattacgtcgatgtgaangtgaatggtgcgatccacangggtattcctcacaagttctaccacggtcgtactggtcctatntggaacgttttaaccncaccgtcngtgttgaactcaacnnncanatttcca

SEQ ID NO: 16964 - DNA, 436 bp, Arabidopsis thaliana
  unsure at all n locations
  Clone ID: LIB25-001-Q1-E2-D11
ataggctcngaggctaattgcgctgtttgcacggagattttcgagacggngacngaggcgcgtgagatgccgtgtaaacaccttttccacgacgattgcatcgtaccgtggctatcgattcgaaactcttgtcccgtgtgcagattcgagctaccttcagagcctaatcgacggagcaacaacaacgaggaggataacgccgtggggatgacgatttggagacttcccggtggtggattcgccgtagggaggtttaacgcagcaatgagagacggagagagagttttgccagtggtgttaacagaaatggatggtggtgggattggtaatagccaggatggtcctagacggatctcatgggttaggtcacacggtacactcgaatcggatagtaacggtactggctcaagttcccggctccggtggaagattgagg

SEQ ID NO: 16965 - DNA, 493 bp, Arabidopsis thaliana
  unsure at all n locations
  Clone ID: LIB25-001-Q1-E2-A5
tacatcccaattctaaaaaaattgttttttcaatttttctcctttgatttcttaaaagaagatccacaacaacaagaatgaatacattcaagatatcatatttcattatggtgctcataatggtcttagccattgctataacatttagcgagccgctaacggttgaagcaaaacatcaacacaaatatggttgggggatagccgcttctgcaaggaacaaaggtaggaaacatttaggtgcaacattgacatgtgacaaaagccttcccccccaagggtatgtccgtctcaaaggcantccangtcgtaattgttgtccgttaagaaagtggtgtcccaattttganggaccaaacaaaattngaactggccgggaagatgtttggaaaaaatgctggccaaattaactcccggaaggggtttgcctggcaaaccgggntaaantggtgttaaaaccccaaatngttttggataagggagaacaattggtggg

SEQ ID NO: 16966 - DNA, 440 bp, Arabidopsis thaliana
  unsure at all n locations
  Clone ID: LIB25-001-Q1-E1-E12
tcatttaactttcctaaaacaatggctttaaaacatatgcaaatctttctcttcgtcgctatattttcatcattctgtttctccatcactctttctcgtccactcgacaatgaactcatcatgcaaaagaggcacatcgagtggatgactaaacacggccgtgtctacgcggatgtgaaggaggaaaacaatcgctacgttgtgttcaaaaacaacgtcgaacgcattgaacatttaaatagcattcctgccggaagaactttcaaacttgcggtaaatcagtttgctgatttaaccaatgacgaatttcgttccatgtacactggtttcaaaggtgtctcggcattatctagccaaaagccaaactaaaatgttcgccgtttaggtaccaaaacgtttcttctggtgctttgccggnttccgttgactggangaaaaaa

SEQ ID NO: 16967 - DNA, 501 bp, Arabidopsis thaliana
  unsure at all n locations
  Clone ID: LIB25-001-Q1-E1-E9
gnnnngnaactcnattagnncgccagtaccganaccaagaattcgccggtcgacccacgcgnccgctctttttttttttttggtgtcacgaaaacgaacgaatcagtgtcggctcttgggttccgaacaaaaacaacattgtacgtcggatccaaaaaacgcgcgttatataaacgcttaatttctccaggattcttcttctgcttccgccattgctcgaaaatcgcgtcttctgacaatgtgctgaaactgagtcatcgtccgagttagcaaagtgaaacttcgaagtttctcttacactaatctcaggtttgggattttgtaagaaaccgcgtttacaaaatgttcaagttgaagcaatggttgatttatttggtgtgttcgttagtaataatgaacacagaaggactgtttgtcaatattacatttgttcgaaacgcagtcgctaaaggggccgtttgtttagatggaagtccaccancttancaattgggtaaaagg

SEQ ID NO: 16968 - DNA, 55 bp, Arabidopsis thaliana
  unsure at all n locations
  Clone ID: LIB25-001-Q1-E1-F12
tctctcccttggtttggnaactgccngtggtgtcatgaccactttgatcccaagg

SEQ ID NO: 16969 - DNA, 432 bp, Arabidopsis thaliana
  unsure at all n locations
  Clone ID: LIB25-001-Q1-E1-F9
cttggctcagtaactattaatgttgaacgtgaaggccaaacgggtccagtgtggcactcattagacagcccgtctgggcaggtttgccttaacattaatgcaatcaaactacccgtgaatgctcctagggctgtaactggatatgctggagccggtagaagaagggtcacattggatcagcaaggcccaacaattgtacatcaaaagccagggcctctgcagacgatatttgatctcctcccggatgaggttgtcgagcacagttattcatgtgccctggagaggtcattcctgtatcatggccgaatgtatgtttccgcgtggcacatatgtttccactccaatgttttctctaagcaaatgaaggttgttgtccctctcggagatatanatgagattcgtanaagtcaacaccgttgataaacccancta

SEQ ID NO: 16970 - DNA, 524 bp, Arabidopsis thaliana
  unsure at all n locations
  Clone ID: LIB25-001-Q1-E1-G10
gggtngnaacttcnattnagnacgcnccgtatcacgacacaaattcggccggtcgacccacgcgnccgagcgtttatactctgtaatgccagatccgcggtaacgcaagtcagtgacctactccggcgtttatcactgaatccgattatggctagtcttcttcgatccttaatccttttgctaatcgtgcaatcatttttggttgcgatcgctttcgggtcgaaagaagttgaagaattcagcgaggcattgctcttgaagcctttacctgatcgaaaagttttagctcacttccacttcgagaaccgagctcctccgtcaaactcccatggccgccatcaccatctcttcccgaaagctatttctcagttggttcaaaagtttcgggtcaaggagatggagttatcttttactcaagggtcgatgggaaccatgaaacaattggggaaggatttgaccctccaatcaagtatgaatgcnaanccctgttggtgttggaacctgttgggcngtgttttgangtt

SEQ ID NO: 16971 - DNA, 427 bp, Arabidopsis thaliana
  Clone ID: LIB25-001-Q1-E1-G11
tgctgctgcttctcatcctggtttctctgagaaccatccagacgtacagaaccccaaacaaatagataaggatcatgttcttgagaaactgaaggatctcgtctttagtcatgatgagcatggagacaacagtctaactgaaactgttgaacaagccaacattcccacctgcaagaacttggaagacagagatacacttgaagaggaaacatgttcagaggggaaaatagatggcagttgtcttgtatcctctcctcttccacatacaataagccagttgatgcatgaggtgaaggaactcagggcatgcgggctggaaaattcaaccaagatatgttacttggaagagaagctggacaaagcacacaaggaaatttatcaattgacagagcgttgcaacatgctggagtccatatcaagtccttta

SEQ ID NO: 16972 - DNA, 504 bp, Arabidopsis thaliana
  unsure at all n locations
  Clone ID: LIB25-001-Q1-E1-G9
gtntngancatcntnnagnnngntcggtaccgnnactggaattcgcgggtccgacccacgcgnccaatggaaccgccggccaccgcatctaatcgctcttccagacggctactctttgaccgccgttacggctgggtgtaaattctctatctttatcagttaaattcattttccantttaatggagacaaaatgattctgtgttggcttaacagggtcgacgaatggaaggacccatcggaggaagctctcgccggcggcagaggaatgttttgtgtagttcccttgacgaaaactctgtttcagacagcttcacaatcaatgaactcagctgtcaaatttctggatatgaagtttcagaaattggcaaatcctatgcacaatccaagtggagatttagggtcaaaatcaaatgtgttggattaacaagtacatgtgtttantgttggattatacgtctagatctcanctaagtactttgntcaaagttttttggctgngntna

SEQ ID NO: 16973 - DNA, 379 bp, Arabidopsis thaliana
  unsure at all n locations
  Clone ID: LIB25-001-Q1-E1-H10
tgatgttacattccctgcgcttcaatgttcgattattagtcttgattccatggatatcagtggggagaggcaccttgatgtgcgacatgacattattaaaaggagattagactcttctggcaatgtcatcgaggcaaaacaagacggaattggtcatactaagattganaaacctttacaaaaacatggtggaaggttggaacacaatgaaacatactgtggttcctgttttggagcagaagcgtcanatgatgcttgttgtaattcatgtgangaagttcgcgaagcttaccgaaagaaangttgnggccctctccagaccctgaatcaatccgancaantgtaaaaganaanggctttttcaaaaaggtaaaanntg

SEQ ID NO: 16974 - DNA, 417 bp, Arabidopsis thaliana
  unsure at all n locations
  Clone ID: LIB25-001-Q1-E1-H11
acatccatacacaggtcacagagcctttgcttcaagagatttttacaagcactggccctgttgaaagcagtaaactcatcagaaaggataagtcatcatatggatttgttcactactttgatcgaagatccgctgctctggctatactgtctctgaacggaaggcatctgtttggacagcctatcaaantcaattgggcgtatgccactggtcagagggaagatacatcaagtcatttcaacatttttgttggagatctcagtccagaggtcactgatgcaacattatatcaaagcttttctgtcttttccagttgttcngatncnaganttangtgggaccaanaaactgggcnctcgatangctttgggtttgtttccttcncaatcaacagggntgcncaaactgccattanng

SEQ ID NO: 16975 - DNA, 462 bp, Arabidopsis thaliana
  unsure at all n locations
  Clone ID: LIB25-001-Q1-E2-A1
gactcagtcgagcagagaatgacgacgattgttcccacctccgaagaagatccttacctcgccattgttcgtttcacttcccagcttgcctgggctgatgctggtcccgaggtcgcagagcctgaagtttccaggctatgtaaggaagcagaggagtctataataaatgggaagtggctggatttggcaacgttgatggtaacttcagctgacttggtatcagccaaaatctctgagaaagatcttgagtgtacctacaccatcatttgcaaccttgtcaagaaaantntgccgaacaagtcctgaggaantccttgaaatggtgaaactatactgctaaggttatcaacaaccaaacgacaaagcttcattgnttttgaanantcncttaanncnaaaaaaanccgggtanacaaccaaaatgcccgttttcaaanntacatgaaagcnctggaacnggnt

SEQ ID NO: 16976 - DNA, 441 bp, Arabidopsis thaliana
  unsure at all n locations
  Clone ID: LIB25-001-Q1-E2-A10
tctttggacacggatggctcaagccttggctcaaccaccactggtggtcaccaccgtcgtcccagacccgccgccgccgccaccaccaccgcacccaaagccgtatgctctacgatacatggcggntcttcttggccggattggtataatggatacanacaaagatggtaacatcagcccacagagtccgaggagtcctaggagcccangaaacaacattctcatggggaagtacgagcttgggaagcttctcggccacggaacctttgcaaaggtttatttagctcaaaacatcaaatctggagataaagtcgccattaaagtcatcgannaggagaagattatganagagtggtttggctgctcacatcannacggggaaatctctatcntccgccgtgtccgtcacccttacatcgntcaaccaagtcgacgttattg

SEQ ID NO: 16977 - DNA, 507 bp, Arabidopsis thaliana
  unsure at all n locations
  Clone ID: LIB25-001-Q1-E2-A11
gnnnnngnnnaactgtttacgcctgcctttacgccgggnccgtaccggtccataattcccgggnacgtttcctcgcactcaacatcatcatcagaggttnaaagacgaacgaatnagatgccttcaagcacattctccgggactgttagcacgccgaagctgtcggtggcagtggacatgggaaacccttttctcaatctcaccgttgatgccttcctcaagatcggagctgttggagtcactaaatctcttgcagaagacacttacaangccatcgacaaagggagtctctccangagcactttggaccatgcgcttaagaagttgtgtnaagaaggtgtttactggggagctgctggtggngtgtncattggaacagaatacggnatcgaacgtatccgtggcagcanagattggnanaacgcaatgttagcangcgcggcgacaggagcagtgctctcagcggttggtaacaaaggcaatgacactattgtgatcgatgccant

SEQ ID NO: 16978 - DNA, 449 bp, Arabidopsis thaliana
  unsure at all n locations
  Clone ID: LIB25-001-Q1-E2-A2
aaacttaagggaaagataatcgtttgtctgtgcagagagagagagagagaaaatgaggttgttcgatccatggccagtgttcttcaagagagaatggaaacgttgctggccattcctcaccggtttcgccgtcaccggcgttctcatcaccaagctaaccgccggactcactgaggaagatgctaagaactccaagttcgtccagcaacacagaaggtgattcactgaagcaaaatgtagaagctgacaaggcatatagatttgggacntaaatttaagtgaatgcttcagctttgaaacatgttcaataacaaagaagatcattctatatactcttttattttctctgagtttcgaaatcagcttttccttttctgaaacttagcaatggaatgggttttgttcacaagtatcttaatcccatttgtttgggaaatggattttatggc

SEQ ID NO: 16979 - DNA, 437 bp, Arabidopsis thaliana
  unsure at all n locations
  Clone ID: LIB25-001-Q1-E2-A3
gctgtgtttcatttcaaatcatcatcaaaccggcaaagcgaagcaatatctccattcgtcaacactttatgcttacggtatccattagtacattttttcaaggtggacgtagaggagagcttggcattggcgaaagcagagagcatcaagaaaattccaacgtttaagatttataagaagggagagaaagtgaaggaaatggtatgtcctagtcatcagttactagaggactcngttacgcatttccncttataacatatcnctcttctcattctttcaaanctttttaaaagccttcacgaacgtaaattgattcaaagagccatttgtaattgaaatttcatcctttgtttgcttacggtatancaaattgaaacctgcncnnattgtnttaacccgaggaaatggcaggtttcncnggaaaaaaannnnnnnng

SEQ ID NO: 16980 - DNA, 426 bp, Arabidopsis thaliana
  unsure at all n locations
  Clone ID: LIB25-001-Q1-E1-E11
ggttctcatctttctctctaagagattttgtaggtgacaatcaaaagtttgacaaaatggtgaagtttacagctgatgagcttcgaaggattatggactacaaacacaacatccgtaatatgtctgttattgctcatgtcgaccacgggaaatccactcttactgattctttggttgctgctgctggtatcattgcccaagaggttgctggtgatgttcgtatgactgataccagagctgatgaggctgaacgtggtatcactatcaagtccactggtatttctctctactacgagatgactgatgaatccttgaagagtttcactggagccagagacggaaacgagtacctcatcaatcttattgattcacctgggcacgttgacttttcntctgaagttactgctgctctccgtantaaaggag

SEQ ID NO: 16981 - DNA, 416 bp, Arabidopsis thaliana
  Clone ID: LIB35-021-Q1-E1-D9
tacggctgcgagaagacgacagaagggggatctctggttcgaagaaaatccaccatttccgattgttctttctctttgacaaaacccagatagataaaaattcgttccaattccagtgagctccggaaatggcgtccttcaagttgatgtcttcttccaattccgacttgtctcgccgtaattcttcttctgcttcatcttccccttctataagatcatcgcaccatctccgaccaaatcctcacgccgatcactccagaatcagtttcgcttatggcggaggagtcaacgattacactttcgcgtctgattcaaagcccttcgagatggcgattgatgttgatcggagtatcggagatcggaacagcgttaacaacggaaagagtgttgacgatgtttggaaagagattgtatct

SEQ ID NO: 16982 - DNA, 435 bp, Arabidopsis thaliana
  unsure at all n locations
  Clone ID: LIB35-027-Q1-E1-H9
tacggctgcgagaagacaacagaaggggatgcgtaaacagaaacacgttgatgatctaacggctcagatcaatcagctatcaaacgacaaccgtcagatcttgaacagcctcaccgtaacatctcagctttacatgaagatccaggccgagaactctgttctcaccgctcagatggaggagcttagcaccagactccaatctctcaacgagatcgttgatcttgttcaatccaacggtgcaggatttggtgttgaccagatcgacggctgtggttttgatgatcgtacggttgggatcgacggatattacgatgatatgaatatgatgagtaatgttaatcattggggtggttcggtttacactaaccaacccattatggctaatgatatcaatatgtattgattaatanaattaattaaaataattagatgccc

SEQ ID NO: 16983 - DNA, 331 bp, Arabidopsis thaliana
  Clone ID: LIB35-055-Q1-E1-B3
cgagaagacgacagaagggaagagttttctcaaacgcttcagggtcatactcagccaacatcagtcttgctgttgaaaactcgtcatggaacgatgagaaacagcttcaggacatgtacttgagccgcaaatcgtttgcgtttgatagtgatgctcctggagcaggaatggctgagaagaagcaggtctttgagatggctcttagcactgcagaagtcaccttccagaacctggattcttcagagatttctttgactgatgtgagccactacttcgattctgaccctacagatctagttcagagtttgatgaaggataataagaaaccaag

SEQ ID NO: 16984 - DNA, 436 bp, Arabidopsis thaliana
  Clone ID: LIB35-055-Q1-E2-B3
cgagaagacgacagaagggaagagttttctcaaacgcttcagggtcatactcagccaacatcagtcttgctgttgaaaactcgtcatggaacgatgagaaacagcttcaggacatgtacttgagccgcaaatcgtttgcgtttgatagtgatgctcctggagcaggaatggctgagaagaagcaggtctttgagatggctcttagcactgcagaagtcaccttccagaacctggattcttcagagatttctttgactgatgtgagccactacttcgattctgaccctacaaatctagttcagagtttgaggaaggataagaagaaaccaagctcttacattgctgacactacaactgcaaacgcgcaggtgaggacactatctgagacagtgaggctggacgcaagaacaaagctgctgaatccaaagtggtacga

SEQ ID NO: 16985 - DNA, 439 bp, Arabidopsis thaliana
  Clone ID: LIB35-023-Q1-E1-F11
cccacgcgtccgcccacgcgtccgtacggctgcgagaagacgacagaagggtacggctgcgagaagacgacagaaggggactagagataaccctagaaagatctctctcgatctctggttcgaagaaaatccaccatttccgattgttctttctctttgacaaaacccagatagataaaaattcgttccaattccagtgagctccggaaatggcgtccttcaagttgatgccttcttccaattccgacttgtctcgccgtaattcttcttctgcttcattttccccttctataagatcatcgcaccatctccgaccaaatcctcacgccgatcactccagaatcagtttcgcttacggcggaggagtcaacgattatactttcgcgtctgattcaaagcccttcgagatggcgattgatgttgatcggagtatcggaga

SEQ ID NO: 16986 - DNA, 431 bp, Arabidopsis thaliana
  Clone ID: LIB35-011-Q1-E1-H5
tacaactgcgagaagacgacagaggggatatcaagaaaatgattaatagcactaaccatcagaggtttagcgaggaacacatcaagtcacttgagcttatatatgagtctgagacgatgcttgagccgaggaagaaggttcaggtagctaaagatctagggctgcaaccaatacaagtggctatatggtttcaaaacaagacggctcgatggaaaactacacaacttgagaaagagtataacactcttacagccagttacaacactttggcttcacaatttgaggtcatgaataaagtgaatcaatctctggtctctgagctgcagatactatacgaagatatgcacatgcctaaagaagaaaagcatcatgagtgttgtggtgatcaatgactggatctaagcatcagcacagagtctcataatggaaac

SEQ ID NO: 16987 - DNA, 450 bp, Arabidopsis thaliana
  Clone ID: LIB35-047-Q1-E1-D3
cccacgcgtccgcccacgcgtccgcccacgcgtccgtacggctgcgagaagacgacagaagggtacggctgcgagaagacgacagaaggggaaaaagaacaaaaaaaaaaggtcaaaccaaaacgatggcgtttcatcacaatcatctctcacaagacctctccttcaatcatttcaccgaccaacaccaacctccacctccgcaaccgcctcctcctcctccgcaacagcaacaacatttccaagaagcaccgcctcctaattggttaaacacagcgcttcttcgttcctcagataacaacaataacttcctcaacctccacaaagccaccgctaacaccacaaccgcaagcagttccgattttccttcctccgccgccgcccgcgccgctgctaaccagtggctatcctcgccctcctctttcctctaaccaaacaacaacaacaacg

SEQ ID NO: 16988 - DNA, 460 bp, Arabidopsis thaliana
  unsure at all n locations
  Clone ID: LIB35-023-Q1-E1-F1
cgagaagacgacagaaggggaaagaaaaaaaagaaacaaataattccaaaaccttctctcttaatcaaaatcaagaaacttacaagatctggtgaaaaccatggaagaaggagattttttcaactgctgtttcagcgagattagtagtggcatgaccatgaataagaagaagatgaagaagagcaataaccaaaagaggtttagcgaggaacagatcaagtcacttgagcttatatttgagtctgagacgaggcttgagccgaggaagaaggttcaggtagctagagagctanggctgcaaccaagacaagtggctatatggtttcaaaacaagaaggctcgatggaaaactaagcaacttgagaaagagttatacattcttaagagccaattacaacaatttggcttcacaatttgaaatcatgaagaaagaaaagcaatctctggtctctgagctgca

SEQ ID NO: 16989 - DNA, 435 bp, Arabidopsis thaliana
  Clone ID: LIB35-006-Q1-E1-C12
tacagctgcgagacgacagaagggggagacgctcacattgcaaaaacaaaaccaacaaggaacttgtctctctctctggctctctttctcttaacgtgatcataacgtgattcgaaaattggatatagataggtttcttgttggatcttgatccctctggaaaaggaggggagaatagcagttcatgatgggattttgtatctgcccgttggagtcacctgcgagattactatggagtacagcttcttccgccataagatcatgatcttctaatccttcctacttcttcccatctttttaatcatcttctcgctatctctgcttcccctttctctctgtttcctctttctcagaactcagaagtagttgttgttttatttctgttgatcaaaaatggaatccaattcgtttttcttcgattcatccgcttcacac

SEQ ID NO: 16990 - DNA, 452 bp, Arabidopsis thaliana
  Clone ID: LIB35-024-Q1-E1-H6
tacggctgcggaagacgacagaagggggtcaaggaggaagaagtttcgttgccggagaagattacagaggcaccgtcgtctcctccacagtttcttgaacattctgatggtcttaattaccggagtttcacagatctacgtgatcttcttccattaaaggcggcggcttcttcattcgccgccgcagctggatcttcagacagtagcgattcaagcgctctgctgaatgaagaaagcagctctaatgtcactgtggcggctccggtgacggttccaggaggtaatttcttccagtttgtgaaaatggagcagacggaggatcatgaggactttctgagtggagaagaagcttgtgaattcttttccgatgaacaaccgccgtctctacactggtactccaccgttgatcattggaattgaagctgaaaacaccaccggaagagattttggat

SEQ ID NO: 16991 - DNA, 419 bp, Arabidopsis thaliana
  Clone ID: LIB35-031-Q1-E1-D9
cccacgcgtccgcccacgcgtccgtacggctgcgagaagacgcagaaggatgagttagagaataagcttgagcctgagaggaaagttaagttagctcaagaacttggtcttcaacctcgtcaagttgctgtttggtttcaaaaccgtcgtgctcggtggaagacaaaacagcttgagaaagattacggtgttcttaaaacccagtacgattctctccgtcataactttgattccctccgccgtgacaatgaatctctccttcaagagattagtaaactgaaaacgaagcttaatggaggaggaggagaagaagaagaagaagagaacaacgcggcggtgacaacggagagtgatatttcggtcaaggaggaagaagtttcgttgccggagaagattacagatgcaccgttgtctcctcc

SEQ ID NO: 16992 - DNA, 410 bp, Arabidopsis thaliana
  Clone ID: LIB35-002-Q1-E1-D7
cccacgcgtccgcccacgcgtccgcccacgcgtccgcccacgcgtccgtacggctgcgagaagacgacagaatggtgagttagagaagaaacttgagcctgagaggaaagttcagttagctcaagaacttggtcttcaacctcgtcaagttgctgtctggtttcaaaaccgtcgtgctcggtggaagacagtacagcttgagaaagattacggtgttcttaaaacccagtacgattctctccgtcataactttgattctccccgccgtgacaatgaatcgcgccttcaagagattagtgaactgaagacgacgcttaatagaagaggagaagaagaagaagaagagaacagcgcggcagtgataacggagagtgagatctcggtcaatgaggaagacatttcgtttccgg

SEQ ID NO: 16993 - DNA, 446 bp, Arabidopsis thaliana
  unsure at all n locations
  Clone ID: LIB35-012-Q1-E1-F11
tacggctgcgagaagacgatagaagggggagacgctcacattgcaaaaacaaaaccaacaaggaacttgtctctctctctggctctctttctcttaacgtgatcataacgtgattcgaaaattggatatagataggtttcttgttggatcttgatccctctggaaaaggaggggagaatagcagttcatgatgggattttgtatctgcccgttggagtcacctgcgagattactatggagtacaagcttcttccgccataagatcatgatcttctaatccttcctacttcttcccatctttttaatcatcttctcgctatctctgcttcctctttctctctgtttcctctttctcagaactcagaagtagttgttgttttatttctgttgatcaaaaatggaatcaaattcgttnttcntcgattcatctgcttcacacggcaaca

SEQ ID NO: 16994 - DNA, 453 bp, Arabidopsis thaliana
  Clone ID: LIB35-010-Q1-E1-H6
tacgactgcgagaagacgacagaaggggagagattccaaaaaataaaaataaagaaaacataaatcctctgaggaaaaattccgatgagatgacagaaggtggagaatattctccggcgatgatgtcagcagagccattcttgaccatgaagaagatgaagaagagcaaccacaacaagaacaatcagagaaggtttagcgacgagcagatcaagtcactggagatgatgtttgagtctgagacaaggcttgagccaaggaagaaggttcaattagctagagagctagggttgcagccgaggcaagtggctatatggtttcagaacaagagggctcgttggaaatccaagcagctcgagactgagtacaacattctcagacaaaactacgacaacttggcttctcagttcgagtccttaaagaaagaaaaacaagctttagtctctgagttgc

SEQ ID NO: 16995 - DNA, 392 bp, Arabidopsis thaliana
  Clone ID: LIB35-035-Q1-E1-B8
tacggctgcgagaagacgacagaaggggagagcgagagatctttgatggaacgagtcagacaagaactcaaacatgaactcaagcagggttacaaggagaaaattgtggacataagagaggagatactgaggaagagaagagctggaaaattaccaggagacaccacctctgttctcaaatcatggtggcaatctcattctaagtggccttaccctactgaggaagataaggcgaggttggtgcaggagacgggtttgcagctcaaacagataaacaattggttcatcaatcaaagaaagaggaattggcatagcaatccatcttcttctaccgtctcaaagaataaacgccgaagcaatgcaggtgaaaacagcggaagagaccgttgaga

SEQ ID NO: 16996 - DNA, 402 bp, Arabidopsis thaliana
  unsure at all n locations
  Clone ID: LIB35-055-Q1-E2-E4
agtacagaggctagagagaatgggatgggaataagcttgtttcgcaggttatcagaagcccatcctcaggcaatttcagtgttacaaaaccagtaccgaatgtgtcgaggtattatggaactatcaaatgccttgatatatggagacagattatgctgcggttctgctgaagtagctgatgccacacttgtgctttctacctccagttctacttcgccatggcttaaaaaggttctggagccaacaagaacagttgtatttgttaatacagatatgctgcgtgcttttgaagctagggatcagaatgcgatcaacaatccagttgaagcttccataatagctgagattgtanaggagctagttaacaatggagttggatantaaanatattgggatcctacc

SEQ ID NO: 16997 - DNA, 397 bp, Arabidopsis thaliana
  Clone ID: LIB35-055-Q1-E2-E8
ggacctactgctgaatcacgtggatccttaaatctgaatatccaatactggacaagtcgaggttgggcatttgttgatgtcaattatggtggaagcacaggttatggtcgagagtatcgagagcggttgttaaggcagtggggaatagtcgacgttgatgactgttgtggctgtgctaaatacttggtatcttctggcaaggcagatgttaagcagctctgtatatctggcggttctgcaggaggttacacaactcttgcatcattggcgttcagggatgttttcaaagctggagcgtccttatacggagtggctgatttaaaaatgttgaaagaagaaggtcataaatttgaatcccgttatatcgacaatcctgttggagatgaaaaagatttct

SEQ ID NO: 16998 - DNA, 254 bp, Arabidopsis thaliana
  unsure at all n locations
  Clone ID: LIB35-055-Q1-E2-F11
agcaacagtcatcaaagagccaatggcttcttcaggtttcagcggcgatgaaactgcgcctttcttcggattcctcggcgccgccgctgcgctcgttttctcctgtatgggagcaacgtacgggacggcgaagantggagttggagttgcgtccatgggaatnatgagacctgaacntnttattaaatccaatgntcccggtngccanggcnggggtntttaggtatttanggtttgatcatccctgttatcaa

SEQ ID NO: 16999 - DNA, 404 bp, Arabidopsis thaliana
  unsure at all n locations
  Clone ID: LIB35-055-Q1-E2-E11
cgttgatctctaaatctccttacgatctctcctctcacgagtctccaagtcgtccaagctcataaagattcatcgagaagaaagataaaatcctaagtctggtgcaagtctcgagtagaataacatcatttctaggacatggcaaactcattacggctgtatctagcatgcataaaaaatacactcgaggctgccatgtgcttacagaattttccttgtcaagaagttgaaaggcataataaaccagaggttgaattaaagacgagcccagaacttttgctaaatcctgttttaatatgccgaaatgaggctgaaaagtgtttaataagaaacatccaataaantcaatnccgggttaancctcaaggtcaagcaagcggatgaacttgaaaacatactaacca

SEQ ID NO: 17000 - DNA, 398 bp, Arabidopsis thaliana
  unsure at all n locations
  Clone ID: LIB35-055-Q1-E2-F3
taactcccaaaaaaaaaaatggcggcgtttttgcaaacgaacatcagtctgaatgcgatcaagatcgtcccggggaaatacagttctctcaccgatcatcagtttcgtgcgccgtatcgaattaggtgcgccgccgcttcacctgggaaaaaacggtataacatcgctctgcttcccggagacggtatcggtccagaagttatctctgttgctaagaatgtgcttcagaaagctggatctctcgaaggactggagtttgatttcaaggagatgcctgtcggaggagcagccttggatttggttggagttccattgccggaggaaactttcacgggtgcaaaactatcctgatgccattcttcttggagctattggaagggtacaaatgggacaangaa

SEQ ID NO: 17001 - DNA, 389 bp, Arabidopsis thaliana
  Clone ID: LIB35-055-Q1-E2-G4
acagattcgatttgggtgtttttggttttggatttggtaaagcttctcggtcacttgctcggtgattgaaactgaatcgattgtgattgtgattgtgattgtgattgtgattgtgagggaattatggctcaagccgtagaagagtggtacaagcagatgccgattataacccggtcgtatctcacggcggctgtagtcaccaccgtcgggtgttcgctcgagattatatctccttataatctctacctaaatcctacccttgtggtgaagcaataccaagttctggcgtcttgtcacaaatttcctttatttccgaaagatggatttggactttttgttccaaatgtgtttcctccttgtgcatatgaactcaaattgtgtacaaaagt

SEQ ID NO: 17002 - DNA, 351 bp, Arabidopsis thaliana
  unsure at all n locations
  Clone ID: LIB35-055-Q1-E2-H11
ggcgaaatcgannnnnnnnnnnnnnnnnnnnnnnnnnnnnnnnnnnnnnnnnnnnnnnnnnnnngaaaccatttgatcgatctctcaggttacttagaatggcacaagaagccgatgggatcagattggaccaaagacatgggaaggctcgagtgagagttggaagagtttggcgtcatgctcatgatggatctcatcactttgttgaatggaatgttagcatcaagttttctctctcactgtctctcttcttaccgtcttgatgataactccgatantgtcgccacagattccaattaaaacaacngttaaggttnaaagccaaggaatgtggagatcggctctcggtgg

SEQ ID NO: 17003 - DNA, 360 bp, Arabidopsis thaliana
  unsure at all n locations
  Clone ID: LIB35-055-Q1-E2-H12
tggctggtccataaacgccttttgtgagctcgtggctcagtctcaaagggagagatggtcttttgataatgagcacttaggttccggacgacgaagactaagtgggtgtagtagtagcagattctcatgctccccttctgttgatcagcagacttgtgggcgttgctcaaagcttttaactgaaaggtctccagttgccaggtttgaccttccaattcctgctgttctagcgtgcggccatgtttaccatgcggcatgcttagagacaatgacaaatgaaacagagaagtatgatcctacgtgtcccatatgcacagagacacaaggttacnaatttancganggaaagctctaaaaccg

SEQ ID NO: 17004 - DNA, 394 bp, Arabidopsis thaliana
  unsure at all n locations
  Clone ID: LIB35-055-Q1-E2-H8
gaatatgttgtgactcgttggtaccgagccccagagcttctcctctgttgtgacaactatggaacatccattgatgtttggtctgttggtcgcattttcgccgagcttcttggtaggaaaccgatattccaaggaacggaatgtcttaaccagctgaagctcattgtcaacattctcggaagccaaagagaagaagatcttgagttcatagataacccgaaagctaaaagatacattagatcacttccgtactcacctgggatgtctttatccaagactttacccgggcgctcatgttttggccatcgaccttctgcaagaaaatgcttgtttttgatccgtcaaagangatagtgtctctgaagcactccaacatccatacatggggnctcca

SEQ ID NO: 17005 - DNA, 321 bp, Arabidopsis thaliana
  unsure at all n locations
  Clone ID: LIB35-056-Q1-E1-A7
aagaaaacaaagacttatcgatcatgaagatcagacttagcataaccatcatacctttatcatacacagtggctacggtggccgggacancaatgcggtcgtcaaggcggtggtcgaacttgtcccggtaacatctgctgcagtcagtacggttactgtggnaccaccgcngactactgttctccgaccaacaactgtcaanngcagttgttggggaagntggggcctangcgggcccagggggaagagcgccgtcgaanngtacgcgnccaacntaccganttctantaatccgggggcagaaataattggggatttgga

SEQ ID NO: 17006 - DNA, 375 bp, Arabidopsis thaliana
  unsure at all n locations
  Clone ID: LIB35-056-Q1-E1-B7
gcccaaccgcgcatacgatcatcgacatcatggcggcaagagcccactagccaccccccccganccattgcgcctgggaccaataatccgccagatgattcacatttcccgagagaaccgattgtagttccgattccganaaggtctctcgtttccacgtgtctgacagtcggaatgccgtttccatgcnttgngatccgtanatgccgacgcgggcgcgagtgggagatntccnggagttgcangtatcangccggggtcngagagtcctcgtccccacgantgntgttganccgtcggttctcaatgggtgnattcgngtnggcgntcancggcgcanattgggaactcgggaatcccggattctcggctggg

SEQ ID NO: 17007 - DNA, 343 bp, Arabidopsis thaliana
  unsure at all n locations
  Clone ID: LIB35-056-Q1-E1-C5
agagatcganagaagaatagtttgatcatcttgtgagaaaaataatggctgctttagtgatgctatcttcggtgacattgaaaccagctggtttcacggtggagaagacngcggctaggggattaccgtcgctcacaagagctcgtccctccttcaaaattgtcgccagtggcgtcaagangatcaagaccgacaaggcccttcggnattaacgggnagnatggnctttgagggacngcgttcgacgcctccnggncagaanaggggcaaggggatacggtgtttaacaagtacgtcgancangtatnggnnctaacgtcnatggagtacagtcctanttaca

SEQ ID NO: 17008 - DNA, 393 bp, Arabidopsis thaliana
  unsure at all n locations
  Clone ID: LIB35-056-Q1-E1-C6
ttggtagccctgcaggtaaaggtccggaattcccgggtcgacccacgcgtccgcccacgcgtccgctgcgagaagacgacagaagggtggaggcgttcttgatcatactctcagtcacccagcttatttacatcgcagcagttcatggcgtgaggagaccttaaggaatcattcatgggcgtcggatttcttttcttcctattgtggcaatcatccgaaactcgggatnnnnnnnnnnnnnnnnnnnnnnnnnnnnnnnnnnctttattttcttcataggaagcttaagataaattcatgcattctttatgtacaaaaggattagatcttgttttgtgtgttgtcactttgtgttcatggaataaaatcgaactttgaggcaaaaaaaaaaaa

SEQ ID NO: 17009 - DNA, 325 bp, Arabidopsis thaliana
  unsure at all n locations
  Clone ID: LIB35-056-Q1-E1-C8
ccgtaattcacgataactatgagctcaaggccagagaggcttctgcacttaagaagatcgaagagttatctaagttgctagaaggaagcttcttccacacatgagaaaggggaagagattactaataccaatccttttgataacagtaccgggagaacaganagtacangaaagtcctttggaagctattgatagacatttgaaagatgacacaacaattcattggtcagctcacaacgttcangtaataggaaaaggagagaaaggtaaagataaagacaccgtggaaagcgaagtgtatcatttagaaaagagagaagcttct

SEQ ID NO: 17010 - DNA, 314 bp, Arabidopsis thaliana
  Clone ID: LIB35-056-Q1-E1-D2
tgcaaacgagaccctcgatgagcaaagttgttcaaatgcttgaaggtgtttttccggtggtccagccacctagttcttccactatgggatcgagactttactcaagcttctttaagtccatcagcgaggacggcggtgctactacgtcatctgggaccgtccgattgtacaagtgagaaattatctctccgcccgtgagactctccggtccgagatagcaatctttttagccaatttttagtatcttatataataggtttttggctcaccatgttttgttgtatattgtttttgtgttacatcttaaaagaata

SEQ ID NO: 17011 - DNA, 340 bp, Arabidopsis thaliana
  unsure at all n locations
  Clone ID: LIB35-056-Q1-E1-D3
gagcttaagcaagcacttgacgctgatatacaaggatcggatcatgaaggagagagagatgcanagttatatagaagagcgtgagcgtgaagtcgctgagcgagaagctgcctggaaagttgagctctctcgccgtnnnnnnnnnnnnnnnnnnnnnnnnnnnnnnnnnnnnnnnnnnnnnnnnnnnnnnnnnnnnnnnnnnagtgttcttatggggactgcgtcgaatcangataatcaagatggtgctctggaaattactggtgagttggtggagaaatatcggtgtcttagattctctaaggctaataaatgaggttgggaattggnatctggattc

SEQ ID NO: 17012 - DNA, 329 bp, Arabidopsis thaliana
  unsure at all n locations
  Clone ID: LIB35-056-Q1-E1-D5
ttgtaacggcaagaagcttaggtgtcctgctaagtgtttcaaatcttttcgccgcagccgatggaacaccgttcgtgagagaaaacatggtttgtatctttgagagttacgccggagatattgggtggcgtcactccgaaagccccatcaccggtataccgataagggaagtgagaccaaaagtgacgctagtggtacgaatggcagcttcggtaggtaactatgattacatcatttgattacgaagttcnaaactgatgggcttataaaagctaaaggtcgggctaagtggaatactaatggtgaaagggacaacatatcaaaacana

SEQ ID NO: 17013 - DNA, 319 bp, Arabidopsis thaliana
  unsure at all n locations
  Clone ID: LIB35-056-Q1-E1-D6
ggctgcgtcagtaaaacgtattcttaaaagcaaccattggtgtgattgactctataagagaattcgtcagcgtgaagcaatctccaatctaatcgcagcatatcttctccgattcctattcgtctctgcaattgaatcttccggtaggcgaaagatggcgacgtctgcgagggatttgttgcggnaggaaggaaagttgcatgcgccggttcgttgtgatcgtcgcacgttaaaatttgaattctcgatcgtcatgtgttgttccagtgacgaatcgacggaatatgtgtgcgatcgggaagatttcgatgtcgatgga

SEQ ID NO: 17014 - DNA, 309 bp, Arabidopsis thaliana
  Clone ID: LIB35-055-Q1-E1-E4
agtacagaggctagagagaatgggatgggaataagcttgtttcgcaggttatcagaagcccatcctcaggcaatttcagtgttacaaaaccagtaccgaatgtgtcgaggtattatggaactatcaaatgccttgatatatggagacagattatgctgcggttctgctgaagtagctgatgccacacttgtgctttctacctccagttctacttcgccatggcttaaaaaggttctggagccaacaaagaacaatttgtatttgttaatacagatatgctgcgtgcttttgaagctagggatcagaatg

SEQ ID NO: 17015 - DNA, 303 bp, Arabidopsis thaliana
  unsure at all n locations
  Clone ID: LIB35-055-Q1-E1-E8
ggacctactgctgaatcacgtggatccttaaatctgaatatccaatactggacaagtcgaggttgggcatttgttgatgtcaattatggtggaagcacaggttatggtcgagagtatcgagagcggttgttaaggcagtggggaatagtcgacgttgatgactgttgtggctgtgctaaatacttggtatcttctggcaaggcagatgttaagcagctctgtatatctggcggttctgcaagaagttacacaactccttgcatcattggcgttcanggatgttttcaaagctggagcgtcctt

SEQ ID NO: 17016 - DNA, 306 bp, Arabidopsis thaliana
  unsure at all n locations
  Clone ID: LIB35-055-Q1-E1-F3
taactcccaaaaaaaaaaatggcggcgtttttgcaaacgaacatcagtctgaatgcgatcaagatcgtcccggggaaatacagttctctcaccgatcatcagtttcgtgcgccgtatcgaattaggtgcgccgccgcttcacctgggaaaaaacggtataacatcgctctgcttcccggagacggtatcggtccagaagttatctctgttgctaagaatgtgcttcagaaagctggatctctcgaangactggagtttgatttcaaggagatgcctgtcggaggagcagccttggatttggttgga

SEQ ID NO: 17017 - DNA, 276 bp, Arabidopsis thaliana
  unsure at all n locations
  Clone ID: LIB35-055-Q1-E1-E3
attggattcgggggaacacttggaaatgagagaattttcattgatgaagactttgctaaaatcacagtccgtcatcatgcagttgataaaacttaccagtcaggctctcttttcccaaaccagggttatttaccagtagaggctttggttctangatattgaagcatgggggttaggtggaaacaaggctagggaaattcaacaacnataccnagaanngnagaagnagcctttttcactaacccaacgtccgaaagatcgactttgaaaacgttt

SEQ ID NO: 17018 - DNA, 297 bp, Arabidopsis thaliana
  unsure at all n locations
  Clone ID: LIB35-055-Q1-E1-G4
acagattcgatttgggtgtttttggttttggatttggtaaagcttctcggtcacttgctcggtgattgaaactgaatcgattgtgattgtgattgtgattgtgattgtgattgtgagggaattatggctcaagccgtagaagagtggtacaagcagatgccgattataacccggncntancnnacggnggctgtatncacaaccgtncgggtgtccgcccnaaattatacctccttaaaaaccncnaacctaaatcctaacccttgtgggtgaancaataacaattccggngtcctg

SEQ ID NO: 17019 - DNA, 259 bp, Arabidopsis thaliana
  unsure at all n locations
  Clone ID: LIB35-055-Q1-E1-H5
ggtcgcagtggccaggcccgggcgactgtttaccaaaaacacaggtctccgcaaagtcgtaagaccatgtatgggggctgacgcctgcccagtgccggaaggttaaggaagttggtgacctgatgacaggggagccggcgaccgaagccccggtgaacggcggccgtaacgataacggtcctaaggtagcgaaattcctttgtcnggttaagtttccgacccgcacgaaaaggcgtaacgatctgggcactgtctcgga

SEQ ID NO: 17020 - DNA, 304 bp, Arabidopsis thaliana
  unsure at all n locations
  Clone ID: LIB35-055-Q1-E1-H8
gaatatgttgtgactcgttggtaccgagccccagagcttctcctctgttgtgacaactatggaacatccattgatgtttggtctgttggtcgcattttcgccgagcttcttggtaggaaaccgatattccaaggaacggaatgtcttaaccagctgaagctcattgtcaacattctcggaagccaaagagaagaagatcttgagttcatagataacccgaaagctaaaagatacattagatnacttccgtactcacctgggatgtctttatccagactttacccgggcgctcatgttttggcca

SEQ ID NO: 17021 - DNA, 394 bp, Arabidopsis thaliana
  unsure at all n locations
  Clone ID: LIB35-055-Q1-E2-A1
cagaggagtctgagaaaatggatgaagatagccgactgattgaagaactccgccagactaatgaatatcaaaggtctcagatatcacacttggagaaaagtcttaagcaggccatctcgaatcaggaggataacagattgagcaatgacaaccaaatccgaaaattaaaggacacagttgatgacctaaatcaaaaacttacaaattgtttgagaacaatcgagtccaagagtgttgaacttttaaatcttcaaactgctctangccagtattacgctgaaatcgaagctaaaggagcattttgaacgagagcttgcgatggctaaagacgagttgatgaaaccttctgctcgtttgaaagaatctgaataaccggttaaagtcntcaaattaa

SEQ ID NO: 17022 - DNA, 398 bp, Arabidopsis thaliana
  unsure at all n locations
  Clone ID: LIB35-055-Q1-E2-A11
tagtgatggctccatcagatgaagcagatctctttaacatggttgcaactgctgttgcgattgatgatcgtccttcttgtttccgttaccctagaggtaacggtattggagttgcattacctcccggaaacaaaggtgttccaattgagattgggaaaggtagaattttaaaggaaggagagagagttgcgttgttgggttatggctcagcagttcagagctgtttaggagcggctgtaatgctcgaagaacgcggattaaacgtaactgtagcggatgcacggttttgcaagccattggaccgtgctctcattcgcagcttaactaagtcgcacgaagttccgatnaacggttnaanaaggttccattggaggttttggctcgcacgttgttcagtt

SEQ ID NO: 17023 - DNA, 102 bp, Arabidopsis thaliana
  Clone ID: LIB35-055-Q1-E2-A12
tattagagtgtatatagttggtttggttatggtttagattcgttagtattttgatttagtttacttgtatttaagtttaattatatatcatttttacactta

SEQ ID NO: 17024 - DNA, 395 bp, Arabidopsis thaliana
  unsure at all n locations
  Clone ID: LIB35-055-Q1-E2-A5
agacggaagaaaattcgaatcatcagtgtttgtttcctcctctcttaaagcttagcccttctcaggtcattgttcttcaatggctttgagcaacacaactactggggttgataatacgtttagaaagaagtttgatgtggaagagtttaaggagcgtgctcgtgaacgcgaaaagaaggaatcggatcggtctaaatctcggtccaaaggtcctcctgtgcaaagagcccctttgaagcatagagattatcatgtagacctagaatctcgtctgggcaagacacaagtcgttacaccgggtagcgcctctaagtcagcaagctggttaattctgtcgcgttttgtgattgtgttgttaaaagattccggcaaactacttgggttacataaatngg

SEQ ID NO: 17025 - DNA, 271 bp, Arabidopsis thaliana
  unsure at all n locations
  Clone ID: LIB35-055-Q1-E2-B1
ttttgcctgcccctatcggnccaacccgggtcganccacgcgtccgcccacncgtccgcccacgcgtccgcccacgcgtccgcccacgcgtccgtaggctgcgagaagacgacagaagggtacggctgcgagaagacgacagaagggtacggctgcgagaagacgacagaagggtacggctgcgagaagacgacagaagggtacggctgcgagaaggacgacagaaggggacaaagnaagnagacnnaannaaagangaaanaanaaaaag

SEQ ID NO: 17026 - DNA, 404 bp, Arabidopsis thaliana
  Clone ID: LIB35-055-Q1-E2-B4
cagagcaaagccagagatggagccttaaggccaagaccgtacttgtaaccggtggaacaaaaggcatcgggcatgctatagtagaggaatttgcgggatttggagcagtaatacacacttgtgctagaaacgaatatgagcttaacgagtgtttaagcaaatggcaaaagaagggttttcaagtcactggttcggtctgtgacgcatctttgagaccagagagagaaaagctaatgcggactgtgtcttcaatgtttggtggaaagctcgatatcctcataaacaatttgggagcgattcggtcaaaaccaacgctgggttacacagcagaagatttctcgtttcatatttcgacaaacttagaatccgcttatcatctgagccaacttgcgcaacctcctgct

SEQ ID NO: 17027 - DNA, 488 bp, Arabidopsis thaliana
  unsure at all n locations
  Clone ID: LIB35-055-Q1-E2-B5
ctgtttagccggnccggtaccgnntccanaaattcccgggtcnacccacgcgtccgcccacgcgtccgtacggctgcgagaagacgacagaaggggattacaagcggattgattatctctgtagtcatctctgtttcctcagtaaagtcatcaaggagaagaatgtcaacgtgaaaggatattttgcttggtctcttggggataattacgaattctgtaacggatttaccgtcagattcggactaagttacgttgatttcgcaaatatcactggtgatagagacctcaaagcatctggcaaatggttccagaagttcataaacgttaccgacgaagactctacgaaccaagatctactccgctcaagcgtctcctccaagaaccgtgatcggaagagtcttgcagatgcatgaaatatccaatccactatatgtccaccaagatcatcttcatgtttcctctttctacttgctccatagataaggagc

SEQ ID NO: 17028 - DNA, 404 bp, Arabidopsis thaliana
  Clone ID: LIB35-055-Q1-E2-C1
cgaatgattagttaaagaagaagaagaggagtcttgcgatagaagaagatttttgcgatatcttcatagaaggaagatggtcttatctcaaggctctgcatctctctccttttctcatccataggtcatgcgtccatgagcaattggcataatacgtaattgtcagatggtatactacaactgtggacaagagtgtatgtttttcagtgtggcagtgttggaaaaagaagcaatgcgaggaggcacacctcttcacttaaagagcaaaatcgatgagctgatcaagagtctcttggatttgtgcttctgtacttcttacgaagaagatttagagattgtggaaaacaatttgaaacattttgaaagagaacccacttgagaaatactaccattgggattgtgaa

SEQ ID NO: 17029 - DNA, 406 bp, Arabidopsis thaliana
  unsure at all n locations
  Clone ID: LIB35-055-Q1-E2-D10
acaaacacaaaaatcaaaaggggtcatttactatcttttaagagacgacatatatagttctcgaccaagaaaagaaaagggggtgacctgagttcttcaacacataacataatggccggagttttcaaaacggttacgtttcntgttttggttttcgctgccgttgttgtcttcgcggaggactacgatgttggtgatgatacggaatggacgagacctatggaccccgagttctatactacttgggctaccggtaaaactttccgtgtangcgacgaactcgaatttgatttcgctgccgggaagcatgatgtngcaattgtatcaanaaanctgcnattngaaactngtnagnaaaggaaaaacccattancccacatgaaccgttcctcccggtcaaaattat

SEQ ID NO: 17030 - DNA, 389 bp, Arabidopsis thaliana
  unsure at all n locations
  Clone ID: LIB35-055-Q1-E2-D2
gaaaaagagatggaaggaaaaaagttttcttcaaaatttattcatttgctcattgtgtttttgcttctttgtacgtttctttctcgtaccgaatctgctcttccttatcaccatgaactgttcttggggaggaagcggatgaattattataagcccaacagtgccataggaacaccatcatcagctagtgaccacgctccaggcagtaatgggaggaagttgatgagtatatatagacccaatggagacatatttacaggaccatcaggcagtgggcatggtgggggtcgcactccagccccctagtatatatatattaatgtgtaatcaaggactcacaagcgaaacttttaantctcgatnacgtataacgtatgcgttgggggtat

SEQ ID NO: 17031 - DNA, 401 bp, Arabidopsis thaliana
  Clone ID: LIB35-055-Q1-E2-D5
gccgaaaacgaataagaagattaattgaggagaaatcgaagatgtctatagcgttagtggagaagattcaagccaaattttgaagaagtctagtagattctgtattgtaagctactaaaatctgcgatggtgaggcatttcaatcgtcgccggaaaattcatcggagatattaaaattgaatcaagcttcgaattggtcaaccgatctatattgagtgatccagaggacgaaaccgagatgtatgtggtttacgcaaacagaaccgaggatgacattcttgtgagggaagagctagaaggatgggctaagtaagcataaggagaggctaaagatttggtacgtcgttgaaatcgcaaaggaaggttggagttacagtaccgggtttataactgaaactgtg

SEQ ID NO: 17032 - DNA, 369 bp, Arabidopsis thaliana
  unsure at all n locations
  Clone ID: LIB35-055-Q1-E2-D8
ggcaaagattattggtggatgctgctcatggcgacgcttttacaggaagagaacatcatctcgatttctgattttctctgttcgagcctctagttccatggatgacatggacaccgtctacaagcaattgggattgttttcactaaagaagaagattaaagatgttgttcttaaggctgagatgtttgcaccggatgctcttgagcttgaagaagagcagtggataaagcaagaagaaacaatgcgttactttgatttatgggatgatcccgctaaatctgatgaagattcttctcaaattagctgatcgagctaaagcagtcgattccctcaaagatttcaaatacaaggctgaagaaantaaactga

SEQ ID NO: 17033 - DNA, 301 bp, Arabidopsis thaliana
  unsure at all n locations
  Clone ID: LIB35-054-Q1-E1-C9
ggtcgcagtgaccaggcccgggcgactgtttaccaaaaacacaggtctccgcaaagtcgtaagaccatgtatgggggctgacgcctgcccagtgccggaaggttaaggaagttggtgacctgatgacaggggagccggcgaccgaagccccggtgaacggcggccgtaacaataacggtcctaaggtagcgaaattccttgtcgggtaagttccgacccgcacgaaaggcgtaacgatctgggcactgtctccganaaaaggctcggtgaantanacatgtctgtgaagatgcggactacc

SEQ ID NO: 17034 - DNA, 226 bp, Arabidopsis thaliana
  Clone ID: LIB35-054-Q1-E1-D12
tacggataaaataatctcgacggaaggacaaagagttggtattaaaaaagctttggtgttttacatcggaaaagctcctaaaggtactaaaaccaattggatcatgcatgagtatcgtctcattgaaccttctcgtagaaacggaagcactaaagtttggatgaattgggttctatgtcgaatatacaagaagcaatcaagtgcgcaaaaacaagtttacgataat

SEQ ID NO: 17035 - DNA, 303 bp, Arabidopsis thaliana
  unsure at all n locations
  Clone ID: LIB35-054-Q1-E1-C6
gagagatagaaagagaaagaaatcgtcatggctcatgggagatatgatacttacaagaagaaaagtggacagattcctcggtttggagaatgggaagaancaaatgagatgccaataacacaatactttgagaatccaagacaagctggtctgattcgtcaccaatacacaacaannnnnnnnnnnnnnnnnnnnnnnnnnnnnnnnnnnnnnnnnnnnnnnnnnnnagaanccttaaagcttgcttctcacnatccccgtccacgtcacctccacgctcanngacagacggcggggacgaag

SEQ ID NO: 17036 - DNA, 301 bp, Arabidopsis thaliana
  unsure at all n locations
  Clone ID: LIB35-054-Q1-E1-D2
acacaaacaaacatatagaaaaaganagaggaggataataatatggcgagcaanaaagcagctatggttatgatggcgatgatcgtgataatggctatgttggtcgatacatcagtagcgatagatctctgcggcatgagccaggatgagttgaatgagtgcaaaccagcggttagcaaggagaatccgacgagcccatcacagccttgctgcaccgctctgcaacacgctgattttgcatgtctttgtggttacaaagaactctccatggctcggttctttcggtgttgatcctgaactc

SEQ ID NO: 17037 - DNA, 276 bp, Arabidopsis thaliana
  Clone ID: LIB35-054-Q1-E1-D3
gaaaaagagatggaaagaaaaaagttttcttcaaaatttattcatttgctcattgtgtttttgcttctttgtacgtttctttctcgtaccgaatctgctcttccttatcaccatgaactgttcttggggaggaagcggatgaattattataagcccaacagtgccataggaacaccatcatcaactagtgaccacgctccaggcagtaatgggaggaagttgatgagtatatatagacccatggagacatatttacaggaccatcaggcagtgggc

SEQ ID NO: 17038 - DNA, 176 bp, Arabidopsis thaliana
  Clone ID: LIB35-054-Q1-E1-D6
ctcaacaatggcgaaatcagtgtcgacggcggcttcctcgcttgtgcaaaaccttaggcggtacatcaagaagccatggcagatcaccggaccttgcgctcacccagaatacctcgaagctgttccaaaggcgacggagtatcgtctccgatgccccgctacgattgatgaagaag

SEQ ID NO: 17039 - DNA, 301 bp, Arabidopsis thaliana
  Clone ID: LIB35-054-Q1-E1-D9
acataaaagcttaaaagaaaacaaaaagaatggggagagcaagagaaataggagaaggaaactcatcgtcgttaagggaacaacgaaacctcagagagaaggatcgaaggatgcgcatgaaacatctcttctctatactttcttctcatgtttctcccactcgcaagttaccagtgcctcaccttatagatcaagcgacatcatacatgatccaattgaaagagaatgtaaattatttgaaagaagaaagaaaaaggacattgttacaaggagaactcgggaatctctacgaagggtcgtt

SEQ ID NO: 17040 - DNA, 302 bp, Arabidopsis thaliana
  unsure at all n locations
  Clone ID: LIB35-054-Q1-E1-E12
cactcactcaatttggtttcttgttttgctctctagatctctcttttctctcttctttccatctccagcaatgggagcttgtttaacactctcgttctcttgtgatgaagttgtgaatcaaatctctcaaggtttatgcatcaacgtgggttatgtttgcgagctctccaagaatgtagtggctatgaagaaagacatggaagtgctgaagaaaaagcgagatgatgtgaaaaagaaaggtanatatagaagagttcacaaggcgtcgtgaaaggctttctcaagtccaaggatggcttacg

SEQ ID NO: 17041 - DNA, 291 bp, Arabidopsis thaliana
  Clone ID: LIB35-054-Q1-E1-F10
gactcgagacattaacgacttttaaaactaagggacgaaccttaagcaaaagctcttgcattactcaaattcttctgccacttggtttgcgatggacagttctggagcagatctagatagaattgaggcacaaaggtcaatgttagtttctcatgatcaacggaaagatttctctcacagcggaggagttggcaccacgtcacctacgggcgacaccgaacctggtgccaaagttccgtactaaccttaaattgtcggatcttttcgctctccctggtgaagatgtcgaga

SEQ ID NO: 17042 - DNA, 300 bp, Arabidopsis thaliana
  unsure at all n locations
  Clone ID: LIB35-054-Q1-E1-F2
agccanaaatcacttcttancaaantggattcgcataaccnatcnatggaaatggctccagtgatcatgtggcgagaagacaacangcctgaatcttatcgggaatactggagacgcccgtcaaggagtcctaagaaaagtancgactttgaaactgctactccatgggacttgctctcagatgaangagaaggtccagatgcatcctcatcantccctcnaaatgatatcgcacgagttgattttggagcggtcgangttgtccagtgcctaattgancaccacatgtgcgattttcac

SEQ ID NO: 17043 - DNA, 301 bp, Arabidopsis thaliana
  unsure at all n locations
  Clone ID: LIB35-054-Q1-E1-F5
gcaacaacaacaacaaccaanaaggagagagcttctgctgaaatcggcggtggcgattccggcgattctgcaattgaaggaagctccgatatcagcggcgcgtgaggtggaagttggatcgtacctacctctgtctccgtctgatccttctttcgtcctgtttaaagccaaaccttcagatactcctgctctccgcgcaggaaatgttcanccctatcagtttgttctaccgccgaattggaaacagttgcnaatagccaatattttgtcaggtaattactgtcaaccgaaatgtgcagag

SEQ ID NO: 17044 - DNA, 292 bp, Arabidopsis thaliana
  Clone ID: LIB35-054-Q1-E1-G5
ataggctaccaacatggatgaagatgccgatggaaagaaagagcaaactgatgatggtgtttcagtggaagatactgtaatgaaggaaaacgtggaatctaaagacaataactatgccaaagatgatgaaaaagagaccaaagagacagatattactgaggcagaccacaaaaaagctgggaaggaggacatacaacatgaagctgacaaagcaaatggaacaaaagatggcaatacaggagacatcaaagaggaagggacactggtagatgaagacaaagggacagatatg

SEQ ID NO: 17045 - DNA, 304 bp, Arabidopsis thaliana
  Clone ID: LIB35-054-Q1-E1-G7
cgaagaagcgttggaagcgttcaagagagtgtcgcggttagagggaatcattccagcactggagacctcacacgcactagcttacctcgagaagctatgtcccacattatcagacgggacgagagtggtcttgaacttcagcggaagaggagataaagatgttcagacagtggctaaatatcttgatgtttgaagagagaaacacttatgtttgtttttcagttattcaagacagaatgaaatcctttttggtacttgtaatctgtttgtactttacttctctctggtcagtacgtttccaaca

SEQ ID NO: 17046 - DNA, 251 bp, Arabidopsis thaliana
  unsure at all n locations
  Clone ID: LIB35-054-Q1-E1-H11
cgatcaaagtcttgaatatttcatctatatatacctaagaaagaaaagagttaaagaagtatattttcgattcanagaaagaaaaatgaattctcaccanaatcaaaccggagtgcanaagaagggaataacggagaaaatcatggnnaagctaccangtcatccatgggcctactaacactgggtgttgttcaccacgagangaaagggatgacngagaaagttatgggagcaactggcaagtccanaag

SEQ ID NO: 17047 - DNA, 309 bp, Arabidopsis thaliana
  Clone ID: LIB35-054-Q1-E1-H12
gatgctacaaaagaaaaaagagatcggagacgtgtactatagagtcgactatacttgaggacgcattttcttggaggaaatatggacaaaaggagattcttaatgccaaattcccaagaagttactttagatgcacacacaagtatacccaagggtgcaaggcaacaaagcaagtccagaaggttgagctcgaacccaagatgttcagtatcacatacataggaaaccacactgttaccaccaacgcagaaactcccaagagcaagacttgtgaccatcatgatgagatcttcatggattccgaagatc

SEQ ID NO: 17048 - DNA, 300 bp, Arabidopsis thaliana
  Clone ID: LIB35-055-Q1-E1-A1
cagaggagtctgagaaaatggatgaagatagccgactgattgaagaactccgccagactaatgaatatcaaaggtctcagatatcacacttggagaaaagtcttaagcaggccatctcgaatcaggaggataacagattgagcaatgacaaccaaatccgaaaattaaaggacacagttgatgacctaaatcaaaaacttacaaattgtttgagaacaatcgagtccaagagtgttgaacttttaaatcttcaaactgctctaggccagtattacgctgaaatcgaagctaaggagcatt

SEQ ID NO: 17049 - DNA, 293 bp, Arabidopsis thaliana
  Clone ID: LIB35-055-Q1-E1-A5
agacggaagaaaattcgaatcatcagtgtttgtttcctcctctcttaaagcttagcccttctcaggtcattgttcttcaatggctttgagcaacacaactactggggttgataatacgtttagaaagaagtttgatgtggaagagtttaaggagcgtgctcgtgaacgcgaaaagaaggaatcggatcggtctaaatctcggtccaaaggtcctcctgtgcaaaagagccccttttgaagcatagagattatcatgtagacctagaatctcgtctgggcaagacacaggtcgt

SEQ ID NO: 17050 - DNA, 309 bp, Arabidopsis thaliana
  unsure at all n locations
  Clone ID: LIB35-055-Q1-E1-B4
cagagcaaagccagagatggagccttaaggccaagaccgtacttgtaaccggtggaacaaaaggcatcgggcatgctatagtagaggaatttgcgggatttggagcagtaatacacacttgtgctagaaacgaatatgagcttaacgagtgtttaagcaaatggcaaaagaagggttttcaagtcactggttcggtctgtgacgcatctttgagaccagagagagaaaagctaatgcggactgtgtcctcaatgntttggtggaaagctcgatatcctcataaacaatttgggagcgattcggtcaaaa

SEQ ID NO: 17051 - DNA, 292 bp, Arabidopsis thaliana
  Clone ID: LIB35-055-Q1-E1-B5
tacaagcggattgattatctctgtagtcatctctgtttcctcagtaaagtcatcaaggagaagaatgtcaacgtgaaaggatattttgcttggtctcttggggataattacgaattctgtaacggatttaccgtcagattcggactaagttacgttgatttcgcaaatatcactggtgatagagacctcaaagcatctggcaaatggttccagaagttcataaacgttaccgacgaagactcctacgaaaccaagatctactccgctcaagcgtctcctccaagaaccgtga

SEQ ID NO: 17052 - DNA, 306 bp, Arabidopsis thaliana
  Clone ID: LIB35-055-Q1-E1-C1
cgaatgattagttaaagaagaagaagaggagtcttgcgatagaagaagatttttgcgatatcttcatagaaggaagatggtcttatctcaaggctctgcatctctctccttttctcatccataggtcatgcgtccatgagcaattggcataatacgtaattgtcagatggtatactacaactgtggacaagagtgtatgtttttcagtgtggcagtgttggaaaaagaagcaatgcgaggaggcacacctcttcacttaaaagagcaaaatcgatgagctgatcaagagtctcttggatttgtgct

SEQ ID NO: 17053 - DNA, 297 bp, Arabidopsis thaliana
  unsure at all n locations
  Clone ID: LIB35-055-Q1-E1-D2
gaaaaagagatggaaggaaaaaagttttcttcaaaatttattcatttgctcattgtgtttttgcttctttgtacgtttctttctcgtaccgaatctgctcttccttatcaccatgaactgttcttggggaggaagcggatgaattattataagcccaacagtgccataggaacaccatcatcagctagtgaccacgctccaggcagtaatgggaggaagttgatgagtatatatagaaccaatgganacatattttacanggaccatcaggcantgggcatggtgggggtcgcactc

SEQ ID NO: 17054 - DNA, 300 bp, Arabidopsis thaliana
  Clone ID: LIB35-055-Q1-E1-D5
gccgaaaacgaataagaagattaattgaggagaaatcgaagatgtctatagcgttagtggagaagattcaagccaaattttgaagaagtctagtagattctgtattgtaagctactaaaatctgcgatggtgaggcatttcaatcgtcgccggaaaattcatcggagatattaaaattgaatcaagcttcgaattggtcaaccgatctatattgagtgatccagaggacgaaaccgagatgtatgtggtttacgcaaacagaaccgaggatgacattcttgtgagggaagagctagaagg

SEQ ID NO: 17055 - DNA, 281 bp, Arabidopsis thaliana
  Clone ID: LIB35-055-Q1-E1-D8
ggcaaagattattggtggatgctgctcatggcgacgcttttacaggaagagaacatcatctcgatttctgattttctctgttcgagcctctagttccatggatgacatggacaccgtctacaagcaattgggattgttttcactaaagaagaagattaaagatgttgttcttaaggctgagatgtttgcaccggatgctcttgagcttgaagaagagcagtggataaagcaaggaagaaccaatgcgttactttgatttatgggatgatcccgctaaatct

SEQ ID NO: 17056 - DNA, 342 bp, Arabidopsis thaliana
  unsure at all n locations
  Clone ID: LIB35-052-Q1-E1-A5
agtcggacccgagcacagtttctttaaagacatgggacgggctgaatactatagcataaccgacgaagaagcgttggaagcgttcaagagagtgtcgcggttagagggaatcattccagcactggagacctcacacgcactagcttacctcgagaagctatgtcccacattatcagacgggacgagagtggtcttgaacttcagcggaagaggagataaagatgttcagacagtggctaaatatcttgatgtttgaagagagaaacacttatgtttgtttttcagttattcagacagaatgaaatcctttttgtacttgtaatcngtttgtacttacttccc

SEQ ID NO: 17057 - DNA, 393 bp, Arabidopsis thaliana
  unsure at all n locations
  Clone ID: LIB35-052-Q1-E1-A6
agaaaattaaaagataacaaacattttaacaannnnnnnnnnnnnnnnnnnnnnnnnnnnnnnnnnnnnnnnnnnnnnnnnnnnnnnnnnnnnnnnnnnnnnnnnnnnnnnnnnnnnnnnnnnnnnnnnnnnnnnnnnnnnnnnnnnnnnnnnnnnnnnnnnnnnnnnnntgttccatttcggccacgctcgtgccatcgaacaagccaaaaaatcgtttccgaatacgtatctgcttgttggatgttgcaatgacgaaattacgaacaaattcaaggggaaaactgtgatgactgaatctgagcgatacgaatctcttcgacattgcaagtgggttgatgaagtgattccagatgcaccatgggttcttacaacagagtttcttgataagca

SEQ ID NO: 17058 - DNA, 421 bp, Arabidopsis thaliana
  unsure at all n locations
  Clone ID: LIB35-052-Q1-E1-B1
ggangagggggatcaacagaaggcgagtgaattgtanccactatggcagtctcctcactctcaatccgctgtggtggtttctcaccaacaatctcccacaagacagaaattctctgtccaaatccatcactcaaagcttgttgtttactttcatccggtggtaaggccgactcctcggagagtacttaccaaaaaggcagcggnaacaattggaagagaaggcaagctcttgtgggagtaggaactttagtggcaacttcaattccagcaactttgcttcttgctgaagagataccaaaaagctactcgccttttgtggatcgagaagacgggtattcttactattacccatcannctgggagggaatttgncttcagggcacatgattcanccttcaaagatagatacttgcaactgnag

SEQ ID NO: 17059 - DNA, 369 bp, Arabidopsis thaliana
  unsure at all n locations
  Clone ID: LIB35-052-Q1-E1-B11
tctcggcaagggtagtttcacggttcacggtaaaccaaagtttgctgataaattggcaatgttggcaggtggaaccggaataactccggtttaccaaattatccaagccattctcaaggatccagaggatgagactgaaatgtacgtcatttatgctaaccggaccgaggaagatattctcctaagggaggaactggatggttgggcagagcaatacccggaccggttaaaggtttggtacgtagtggaatcagctaaggaaggttgggcatacagtaccgggtttatttccgaggcgattatgcgagaacatatccctgatggattanatggctcaacccttgccaaggctttccggaccaacaaccg

SEQ ID NO: 17060 - DNA, 397 bp, Arabidopsis thaliana
  unsure at all n locations
  Clone ID: LIB35-052-Q1-E1-A2
gagattaccaacaagagctctctccaatcgtcgtctctttgatatatggcgtctcagcctgcaggtggcagtcctcctaaaccttgggaaaaagaaggaaatacatctggtcctaatcctttcaggcctccttctaatactagcacggctggttcagttgaggcttctggcacagctaatcctggtgaagtagttcctccgcccgtgaacaggcctaatacagctgctaatatgaattcactcagtaggcctgtaccggctagaccttgggaacagcagaattatgggagcactatggggggaggttatggttcaaatctangtatgacctctgggtatgggtcaggtacatatggttcaacattaagtgggtatgggtcatcatatggtggtggga

SEQ ID NO: 17061 - DNA, 398 bp, Arabidopsis thaliana
  Clone ID: LIB35-052-Q1-E1-B2
cacgacgtcgtcttcttctcactttgaagacgttcttgattcgtttcatcaagagatcgacaacagaaatttccagttttctaacccaaaccgcatctcgtcgctcagaccggacttaaccgaacagaaaaccgggttccacggtcttgcggatacttctaacttcgattgggctagttttgccggtaatgttgagcataataactcggtaccggaactcggaatgagtcatgttgttcctaatctcgagtacaactgtggctacctgaagacggaggaggaagtcgagagcagtcacgggtttaataactcaggcgagttagctcaaaagggttatggtgttgactcgtttgggtattcggggcaagttggtgggtttgggtttaagttatgatgaa

SEQ ID NO: 17062 - DNA, 439 bp, Arabidopsis thaliana
  unsure at all n locations
  Clone ID: LIB35-052-Q1-E1-B4
ctgtttagcctncccgtacccgtccaaaaattccangggtccacccacgcgtccgcccacgcgtccgtacggctgcgagaagacgacagaanggtacggctgcgagaagacgacanaagggtacggctgcgagaagacgacanaagggtacggctgcgagaagacgacataagggtacggctgcgagaagacgacanaagggtacggctgcgagaagacgacanaagggtacggctgcgagaagacgacataagggtacggctgcgagaagacgacataagggtacggctgcgagaagacgacanaagggtacggctgcgagaagacgacatanngatacggctgcgagaagacgacagaagggaaatatatataactttgtttatttgattaaaaaannnccnctctaaaagntnnaactaacctanacanaaaaaag

SEQ ID NO: 17063 - DNA, 392 bp, Arabidopsis thaliana
  unsure at all n locations
  Clone ID: LIB35-052-Q1-E1-B8
gaagggaataactctagagacagggacaaaagtactcactcagcaactgttgttgacgatctaaagtatcgtttgatggatactaccaaagagtttaaggatgttcttaccatgagaaccgagaatatgaaggtccatgaaagtagaaggcaactcttctcttcaaatgcttcaaaagaatcaacaaacccattcgttcgccagcgtcctttggctgctaaggctgctgctagtgaatctgttcctcttccatgggcaaatgggtcttcttcatcttcatctcagttagtcccatggaagccgggagagggagaatcttcaccattgttgcagcagagtnnnnnnnnnnnnnnnnnnnnnnnnnnnnnnatggtcccattgcaagacacata

SEQ ID NO: 17064 - DNA, 401 bp, Arabidopsis thaliana
  unsure at all n locations
  Clone ID: LIB35-052-Q1-E1-C1
gtggaaggtgtgatggtggatgcttggtggggattggtggagaaagatggacctatgaattataactgggaaggctatgccgagcttatacagatggttcaaaagcacggtctcaaactccaggtcgttatgtcattccatcaatgtggaggaaacgtaggagactcttgcagtatccccttgcctccatgggtgcttgaagagatcagcaagaaccctgatcttgtctacacagacaaatctgggagaaggaaccctgaatatatctccttgggatgtgattctgtgcctgtcctaagaggaagaacacctatccaggtctactcagatttcatgaagagcttccgtgaacgatttgaaggctacatanganggagttattgcggaaattcaagttagga

SEQ ID NO: 17065 - DNA, 365 bp, Arabidopsis thaliana
  unsure at all n locations
  Clone ID: LIB35-052-Q1-E1-C11
nnnnnnnnnnnnnnnnnnnnnnnnnnnnnnnnnnnnnnnnnnnnnnnnnnnnnnnnnnnnnnnnnnnnnnnnnnnnnnnnncgttggaaatggctccaccggaggctgaggtgggtgcggtaatggtgatggctcctccaacgccggggacaccgggaacaccgggaggaccgttgatcacggggatgagagtggattcaatgtcgtttgatcatcggaaaccaacgcctcgatgcaaatgcttgccggtgatgggatcaacttggggtcaacatgacacatgcttcaccgattttccctctcctgatgtctccctcactcgcaagcttggagccgagttcgtgggaacattcatcntgatattc

SEQ ID NO: 17066 - DNA, 317 bp, Arabidopsis thaliana
  Clone ID: LIB35-052-Q1-E1-C5
gggcctcagaaggaacttgggcaacttggtgtttttgctgagctgcaagcgctcttccctggtctgcgcatttatgtagatttgattggacctgacgttccacaacatatggatggagaaatgatctccctttgcagatattccccttgcatgggaaaagaatgtgaatgtaaaaattcaagcaaaattctcaattccgggagcaaacctgctttggtttcggctgtgtcattacagctccgtagagggttttaccatgatcgttacaatgacataacaaaggattcatttcctccacacatagtgattgctccaaa

SEQ ID NO: 17067 - DNA, 392 bp, Arabidopsis thaliana
  unsure at all n locations
  Clone ID: LIB35-052-Q1-E1-C7
gtcgtcgattcaaaatccgtcgcttcgcttccaacgttcgccggcaatctaaacattttccgggatggaggaagagatgtcgaaccgtcgagtatcaaatcggactcgtaaggtcgctacgaagatggcggcggctcttacaagcaacgacaatcgaactcaggctgctatagctaggctagaggctttagagaacgataatggtgctattgaagtgatagatttgaacgatgatgaagaagcttctcttgatgaagatgatgatctcggttacttacagaagaagcaacacaaaggatcaaagcgtaaaactcgacaagcgaaagctttagaagctcgtaaagctcctaaatccttccttgagctattgcaagangcaaatttggagtctt

SEQ ID NO: 17068 - DNA, 372 bp, Arabidopsis thaliana
  unsure at all n locations
  Clone ID: LIB35-052-Q1-E1-C9
agagatcctttgatctttttccgatggaggagcaattcggcgggagcgatgagagatggaaaggatcgttggagaatataacggagatggcatcgaatctcgattcgcctcagaaacttctcctcaaaaaagcagtcttcgttgaanaagacactttctctagagcttctctcgtctccgagcaagcccgaacaatcaaggttcttgagcaaagagtacanacactanaaagagaactagatgctgccattacagctgctgctcatgctcggtctganaaacgccaagctgantcctctcaaaaggctgctgaatcacgtgcccaagatgtcacaaaagagcttgaaaacaccacaaagggtttcaanctgc

SEQ ID NO: 17069 - DNA, 483 bp, Arabidopsis thaliana
  unsure at all n locations
  Clone ID: LIB35-052-Q1-E1-D1
ctgttacgccntccgtacgcntccgaaaattcccanggtcnacccacgcgtccgcccacgcgtccgtacggctgcgnnnnnnnnnnnnnnnnnnnnnnnnnnnnnnnnnnnnnnnnnnnnnnnnnnnnnnccttttgagatatggacagcttctggcaattaggtgatgagctacgaggtcagacgagagcatcagaggatcacaaatggtaaactgttgcaaagaagcttttcgaattggaatctaatcatgctggctattacatgttaatgtcgaatgtgtatggggttaagggagaatgggagaatgtggagaagttgagaaattcggtgaagcagagaggaattaagaaaggactggcagagagtttgattgagattagaagaaaagtacatagatttgtggcggatgatgaattgcatcctgagaaagaaccggtttatggattgctgaaagagctggacttgcatatgaaagaagat

SEQ ID NO: 17070 - DNA, 386 bp, Arabidopsis thaliana
  unsure at all n locations
  Clone ID: LIB35-052-Q1-E1-D10
ccaaaaaaataaaagatttttacattcgacgagaccgtgatcgaaacggcgatggttgaccagagtcctcgccgtgttgtcgtggcggcgctcctattgtttgtggttctgtgcgatctttcgaattctgcgggagctgcgaattctgtgtcagctttcgttcagaacgccatcttgtccaacaagattgtcatcttctccaaatcctactgcccgtattgtttgcggtcgaaacgtatattcagccaacttaaggaagagccatttgttgtggagcttgatcagagagaggacggagatcaaatccagtatgagcttttagaattcgttggtcgtcgtactgtcccgcaagtttttgttaacggcaagcataatgggggntcaaa

SEQ ID NO: 17071 - DNA, 389 bp, Arabidopsis thaliana
  unsure at all n locations
  Clone ID: LIB35-052-Q1-E1-D12
ctagctactacaccattctcgggattcgtaaagatgcctctgtttccgatatccgcactgcttatcgtaagctagctatgaaatggcatccggatagatatgctcgaaatcctggagtcgccggagaagctaaacgtcggtttcaacaaatccaggaagcctattctgttttgaatgatgagaataagaggtcaatgtacgatgttggactatatgatcctcatgaagatgatgacgatgacttctgtgatttcatgcaagagatgatcccaatgatgaacaatgtcaaagacgcgggagagagcttggaagacttgcaacgaatgttcacggatatggttggtggagatggcgtgagctatgactgtnataataatccacaggggngg

SEQ ID NO: 17072 - DNA, 395 bp, Arabidopsis thaliana
  unsure at all n locations
  Clone ID: LIB35-052-Q1-E1-D2
gcatcagagcagtttgcagagcgtatggcgcaaatgaaagaagatcctgaattgaaacctatactagctgagattgatgctggtggtccttctgctatgatgaagtactggaatgataaagatgtgttggcaaagctgggtgaagcaatgggtatagctgttggagcanaccagactgttgcagctgaacctgaagaggccgaanaaggggaagaggaagagtctattgttcaccagaccgctagtcttggtgatgtcgagggtttgaaagctgccttggcatctggtgggaacaaagatgaagaanactctgaangaaggactgctttgcattttgcatgtggatacggcnaagtnaaacttcccaagttcttctggattctggacaaatgcaa

SEQ ID NO: 17073 - DNA, 413 bp, Arabidopsis thaliana
  unsure at all n locations
  Clone ID: LIB35-050-Q1-E1-C3
gggctgcgagaagacgacagaagggtacggctgcgagaagacgacagaagggtacggctgcgaagaagacgacagaaggggtacgggctgcgaagaaagacgacagaaggggtacgggctgcgaagaagacgacagaaggggtacggctgccgaagaagacgacaagaaggggcgggggaagaagccgaaggggttgttgctcaaatggggctgatccttgaaatccaaaaatcaaagaaagccatccgaaagcttgccccttgttagactgcaatttcaatgggttggaagaagatctggacccttgctccattgggaagttccttatgtcaaaagcaaaccnacgaanggcaaancgttnagggattcnggggtttgggaaaacacgggtttgggtgaagccgttgttctc

SEQ ID NO: 17074 - DNA, 423 bp, Arabidopsis thaliana
  unsure at all n locations
  Clone ID: LIB35-050-Q1-E1-D10
cggacgcgtgggcggacgcgtgggaagacganagaagggggaagaagcagagattcaaacattcctctgcagattantgaaagcaaatcggaagaagcagcgaatcagcttcagatgggagattcaacatttctcgatagaatgcttctccagcttcgctccacttgcaagtattacagcggttaccctaaggatctcgggccatcgcgggttctccattttacatcagaaagagagtttgtccaactccttcaccagggctatcctgtggttgtcgcattcaccataaggagtaactacacacaacatcttgaccggatgcttgaggaagctgctgctgagttctatcccaacataacaatttatgcgtgttgagtgtttcaagtatcccggattctgcntaacttcgcangaaaaatggga

SEQ ID NO: 17075 - DNA, 501 bp, Arabidopsis thaliana
  unsure at all n locations
  Clone ID: LIB35-050-Q1-E1-D3
acgccngccngtacggtccnannattcncgggtcgatccacnacncntccgcnnagaagacnacagaagggggccttcgaaagcgcctttctgatttctccganagcgtactccatgattgattggttgttttcaggtatctgatctctcttttatttcctccttcagcttctcatccattacaaaagaccagcatgtcgaagatcacttaagaaagaaaacgaagactaatggctttgagaaaagtcttgatcaaggtccaagttttggatgagaagctgaaggaggaaataaacagagagatcagatgcaaacaaaggatcacgcaagccaatcacgccgaagccgggaaagcaaaagtcaagatgataaaaaccactgtttgtcaaagaagaagggcaagttaagganaccctgggaagaagccganggaacaaaaaacccaaagacaagaagcctgnccaaaggctaagcattcagtgttggtaccgaagtggtaat

SEQ ID NO: 17076 - DNA, 418 bp, Arabidopsis thaliana
  unsure at all n locations
  Clone ID: LIB35-050-Q1-E1-C2
ggaggctctgcatccgccatgaaagctgttgggatttttgcttctgcttaccattctaacattagcttatgcgaagaagtcaggtgatgtgacaagagttgcangattggtgttaagtacaaagcctcaagaaatgtgatctccaaggctcacaaaaggggggataaagatcannggttcactatcgggggaaaagttaaactggatgggaactggtctttgattcaaggtttttgangaagaaggttgacccctaaattgaagttttgagcttgggaaactggtcaaagttcgtccccaaaggaattnggggaaccaagggggtttaattggggaagcttngtgttaagggtgaagaaaaganaaaaagttngaaaaattcccaatcccaaagnctttgggttaatgggtgaatnaa

SEQ ID NO: 17077 - DNA, 405 bp, Arabidopsis thaliana
  unsure at all n locations
  Clone ID: LIB35-050-Q1-E1-E10
aggaagaaaactttggcagagagcgaagcatcacacatattttggcctctccttcacgatattcgaagaagtctcctcctccttctccaacgaatcccagatcaggcggcaagtaggcgaatccttacgaagaattctaacttcatcatcaacgatagatactctagtttgattttcaaagtagtagtgtaaaggaatcagaaatggcggtgggagagaaggagcacgaaggaactgtggttgaaagcggcggcgagaagaatgattccgccgttgtactctctgcttccggcgagaagaagacgacgaagcgtaaaggtttgttctcgcgtctttggaatgcgatatttagggttagaggtgatgatttcgaagaagagacttaaaaatatcccaaaggganaa

SEQ ID NO: 17078 - DNA, 389 bp, Arabidopsis thaliana
  unsure at all n locations
  Clone ID: LIB35-050-Q1-E1-E12
caccgttcccatctcttcgtcttctcccgtttccatctccttctgctgctctcgggatccttctggatgattcaacagtgccaggcatttggtttcatggttatatctttctctcaatctaacatagctgttgcattgataacagagttctgtcctgttgccacatacttcctgatgctcggcaagatcaaccgcaggcaatggaaactcacagaactcgcatgttacaatcctcttggggcaaatttctcctttatgactatcgaaaatctcacgttctatggtctctttgcacatcgagcatgctatcggagcatgtgtgttcaagtagtgttcctcagcatgctttttgggtaccatancanccacanatctctaaaatccaaacc

SEQ ID NO: 17079 - DNA, 373 bp, Arabidopsis thaliana
  Clone ID: LIB35-050-Q1-E1-G12
accaaaaaaaaaaggagaagaagaccatcgttgttctccgatggctattaacagaattgctcatggttctctgtttctgacggtagtcttgttctttctgacggttaattacggcgaagctatatggttgacgattccgacgacgggtggaacgaagtgtgtctccgaggagatacagagcaacgtcgtcgttttggctgattactatgtcgtcgatgagcataatcctgaaaatacacctgctgtttcttctaaggtaacatctccgtatgggaacaatcttcatcaccaagaaaatgtaacacatggtcagtttgcattcacaactcaagaagctgggaactacttggcttgtttctgggattgaatccca

SEQ ID NO: 17080 - DNA, 390 bp, Arabidopsis thaliana
  unsure at all n locations
  Clone ID: LIB35-050-Q1-E1-H12
gacgaaaagaaaggggaaaaaaaaaaggaaggaaaaaagtgaaaaccgtcggcttgagaaggaactttgatatttggtgactcttgaaaaaagcaagctctttcttcttccttctttcgcttttttcacacctcaaaatcaaagatccgaaacacgatttcggaggaagcttcgattctacctattttcagatctgaaatagttgtgtttgagaagcgggattggtgatcggagctggaatttggttggtaatcggaggtcagagagaagtcaacggatatgccggaggaagaatcgatagatatcaaattcaggttgtacgatggctcccgatatcgggccttttcggtattctgcnggctttcnaactgttgactttttgaaancaaa

SEQ ID NO: 17081 - DNA, 312 bp, Arabidopsis thaliana
  unsure at all n locations
  Clone ID: LIB35-051-Q1-E1-B9
cgacggcaaaagttgaaaataaaacaataaacagtcgaaattctccggcgaagatgagaaccggaaaaggaaatcaagaggaagaagattacggagaagaagactttaactctaaacgtgaaggtccttcttccaacactactgttcatagcaacagagattcaaaggaaaatgataaagctagtgcgatacgttctaaacattcggtcactgagcaacgtagaagaagcaaaatcaatgaaaaganttcaagattattgagagactaattcccaacagtgaacaaaaacgttgacactgcttcattccttt

SEQ ID NO: 17082 - DNA, 293 bp, Arabidopsis thaliana
  unsure at all n locations
  Clone ID: LIB35-051-Q1-E1-C7
tagnnnnnnnnnnnnnnnnnnnnnnnnnnnnnnnnnnnnnnnnnnnnnnnnnnnnnnnnnnnnnnnnnnnnngccattcacggcgatcctctcaccaataaattgaagaccagaactccggtcccctccgtctccggcaaacgtcagagaaagctccttcgcaaatggcgcagagagcagaaagatatggtggagaagggtcttgttactatggaagatgtggagatggcttctgctcaagctgcatcagaagactccaagaaatcccccagaaaatttagcgttaagaagag

SEQ ID NO: 17083 - DNA, 307 bp, Arabidopsis thaliana
  unsure at all n locations
  Clone ID: LIB35-051-Q1-E1-C9
tccnnnnnnnnnnnnnnnnnnnnnnnnnnnnnnnnnnnnnnnnnnnnnnnnnnnnnnnnagttccattgacggagacatactcgagtcaatcctctcctatttaccactcctagacctcgattccgcttgccaagtctccaaatcatggaaccgcgccgtcttttactccctccgccgccttaaaaccatgccgtggttgttcgtctacaaccaagagaaattctccgccgtacaaccatggcgaacgatggcgatggcttatgattcccaagttccgaaggccttggattcgagctcaacaccggc

SEQ ID NO: 17084 - DNA, 314 bp, Arabidopsis thaliana
  unsure at all n locations
  Clone ID: LIB35-051-Q1-E1-D8
atcgaagagaggcananagagcgatgatgattcgaacggcgttagtgttcgttgtcttcttcgtcggaacagtcgtacaagcgcagctgatacctccggcgaggcgtgatggatttttgtatccaccgggtcagaaaatcgaccgggatacgatacttatngaggccgtntattggacccggtttgtcccggattgtaaagacncttnggaancgntaaaagctagcnattgatnactaatggntctcgcgnttgctctttgttncntcaaccgtcatttcntttacccttccatnagcaattgccattttggt

SEQ ID NO: 17085 - DNA, 284 bp, Arabidopsis thaliana
  unsure at all n locations
  Clone ID: LIB35-051-Q1-E1-E10
gagccaacgagaagagaaaaagtatcttcctttgagaagtgcaagtccatggcagctctctgttgttgtcccaccaccatcatcgtctccgggaaggtttcttcacggattaaaaccgcaggcccattaccccgaatcaacccttttaagaatcagaaacgattgattacagagagaagaaacttgatcgttaaatcgatcattgaagacagagaancaatcgatgttaaaaacgacaatttcaangcaagaggaagaactatcagaagatanagtagaagata

SEQ ID NO: 17086 - DNA, 307 bp, Arabidopsis thaliana
  unsure at all n locations
  Clone ID: LIB35-051-Q1-E1-F10
aggagaaaaggtagtgccaatattagccggcgattcagatggagacggtggtcgataaagatgttctgaagtcttccggggctgagcttcttcccgacggacgtcgangtttacgcatccatgactgggagatcgaaaccctccgcggcacgattctcacttctctcgctgtcgaagagtgggaaaaaaagcttaagacatctcacttacctgaaatggtttttggcgagaatgcattagtccttaaacacttggggtagcaacactaagattcattttaatgcgtttgacgcactanctggttggg

SEQ ID NO: 17087 - DNA, 266 bp, Arabidopsis thaliana
  Clone ID: LIB35-051-Q1-E1-F2
ggtcgcagtgaccaggcccgggcgactgtttaccaaaaacacaggtctccgcaaagtcgtaagaccatgtatgggggctgacgcctgcccagtgccggaaggttaaggaagttggtggcctgatgacaggggagccggcgaccgaagccccggtgaacggcggccgtaactataacggtcctaaggtagcgaaattccttgtcgggtaagttccgacccgcacgaaaggcgtaacgatctgggcactgtctcggagagaggctcgg

SEQ ID NO: 17088 - DNA, 252 bp, Arabidopsis thaliana
  unsure at all n locations
  Clone ID: LIB35-051-Q1-E1-F5
aacaaagagattagaaactacggagagaaagagagaagatatatagccatggcaatgaagtcagtttctaccttggccgtttttgccatcctctttttggttatcgttgaaatgccagagataaaagcgcanggtancaagtgtctgaaagaatatggcggtaatgtgggtttcagctattgtgcgcctaggatatttccgtcattctgttatcgggaactgccgtaagaataagggcgcgaaggggagtag

SEQ ID NO: 17089 - DNA, 309 bp, Arabidopsis thaliana
  unsure at all n locations
  Clone ID: LIB35-051-Q1-E1-H4
agcaagatgttgtttagtttgacaagtcctcgacttnnnnnnnnnnnnnnnnnnnnnnnnnnnnnnnnnnnnnnnnnnnnnnnnnnnnnnnnnnnnnngaggactcaatggactcagctcagccctggaaaatcgatttctttgagaagaagagtcttcttgttgcctgctaaagccacaacagagcaatcaggtccagtaggaggagacaacgtcgatagcaatgttttgccctattgtagcatcaacaaaggctgagaagaaaacaattggtgaaatggaacaagagtttctccaagcgttgcaatc

SEQ ID NO: 17090 - DNA, 307 bp, Arabidopsis thaliana
  unsure at all n locations
  Clone ID: LIB35-051-Q1-E1-H5
gacgaagcgaaacaaaagtactctaagggagagaagtatcaaaattctcatcggaaaaagacagatctacaaattttgagagacaagccatgactaaggtgaaagatgagccacgcgcttccgttgaaggtggatgtggtgttgccgacggtgacggcggcgcgggctgaaatcgggcggtaccggatctgttgaagaaatcgattaacgaagttaggtccacgggagattcanaccgctgagccaacggttcctccaaaatcaacttactatttttctttgggtggaagntgttactgtgtttgat

SEQ ID NO: 17091 - DNA, 352 bp, Arabidopsis thaliana
  unsure at all n locations
  Clone ID: LIB35-052-Q1-E1-A12
agaggaaagttgctacttccttgaaattaatcaatgacacacttgatgatttgattgcaacatgcaagagaatggtagaagaagaggagttgcagtttcacgaggagtatatgaacgaaagagatcctagcatccttcactttcttttagcttcaggagatgatgtctctagtaagcagcttcgtgatgacttgatgacaatgcttatagccggacatgaaacatcggcggcagtattaacatggaccttttaccttttaacaacggaaccaagtgtagttgccaaacttcaagaagaggttgattctgtaattggagatagattcccaaccatacaagatatgaaaaanct

SEQ ID NO: 17092 - DNA, 494 bp, Arabidopsis thaliana
  unsure at all n locations
  Clone ID: LIB35-049-Q1-E1-B12
ntgttagcctgccgtaccgntccgaaaactcccggggtcgacacacgcgtccgcccacgcgtccgcccacgcgtccgtacggctgcgagaagacgacagaaggggaagacaaatcgaatcagaggtcagcaacaactgaaacttcgattggagatagcattctattgatcgtagctctctgttttcactctgtcttcgaaggcatagctattggtatttcagagactaaatcaagatgcttggagagctctctggacaataacactccataagatatttgcagcgattgcaatggggatagctcttctccgtatgatccctgaccgtcctttattctcctcaatcacttattctttcgcattcgccatctcgagcccaattggtgttgccatcgggatagtcatcgatgcaacgactcaagggtccatccgcngattggatattcgcaattgtccaataancntgggcgtgtgggggaaattgtgtatgggtcc

SEQ ID NO: 17093 - DNA, 413 bp, Arabidopsis thaliana
  unsure at all n locations
  Clone ID: LIB35-049-Q1-E1-C1
ggagaaacctctcccacagacgcaaaagcgtctggtttctccagctcaatcttttcctccaaagaggcagagatttgagcaggacgagagtgttgagaagctaccagatgctctgcttcttctggagtcaccgacactcgctcaggtgactggcggagaacatgcttccgttgttgcagctgcaatggctgananttgcattaaggaagagagacttgagtgggaatgcttcntctcttcctccgtcctcccaagctaccaaganggaaattttgcctcattcaaaagaaataatccctgaaaacttttnggggtaatgttgcntggtgcctcctcaanctcaaggggaanggagcaatntttgccnacaaanggantnatgaaccanggcntttttgtgaaaaaaacgggan

SEQ ID NO: 17094 - DNA, 397 bp, Arabidopsis thaliana
  unsure at all n locations
  Clone ID: LIB35-049-Q1-E1-C12
tgaagcagtaagcactcaaccaaaaaaccaattgcgtaaacactttcccttgaatacagagatcacattcgatcagcgagctgatttctcacaagggatatcaaaatttctggtgaagtgggattgtaaaattcggcgttgaaagatatataaagagtggaaggttctggagtcgtttcaattcatggatgatggtactcctaagaagctaaacatattacctgatcactttagtgctcctagtcccacagcagaatcttctcagcacgatactccatcatcttcgcagccaaaggacgatagttctctgagagtaggccttatagccagtcacggactcgcagaaacctgaaaagagcaacaactatgttgaatttgttcacaccctnggcctctg

SEQ ID NO: 17095 - DNA, 398 bp, Arabidopsis thaliana
  unsure at all n locations
  Clone ID: LIB35-049-Q1-E1-A5
ttctgaaattaagtgaatctgaagtggaaagcaaagccggaggaagaaataagaatcacagaggtaaaattgtgatggagctcgaagatccaacaatggcagattccacgattaagctaacagtcaaattcggaggcaaatcaataccactttcggtatcaccagattgtacagtcaaagatcttaagtctcagttacaaccaatcaccaacgttcttcctcgtggccagaagctcatcttcaaaggttttggttgaaacgtcgactttgaaacaatctgatgtgggaagtggagctaaactcatgttaatggcttctcaaggtctgcatcaaggggaaggtccaatacttaangaagctagtataagggcaatcctctagaactgttgtatctggat

SEQ ID NO: 17096 - DNA, 388 bp, Arabidopsis thaliana
  unsure at all n locations
  Clone ID: LIB35-049-Q1-E1-C3
acaaaaacaacatctgaaaaaaatcatgaatccagcagattccgannnnnnnnnnnnnnnnnnnnnnnnnnnnnnnnnnnnnnnnnnnnnnnnnnnnnnnnnnnnnnnnnnnnnnnnnnnggtgccgattggggacctctccctctgaaaactcaaattgaagatccaaacgctcaacctcaacctagtcaagaggattttgatgcttttacttcaacaaaagttgcggatctagctaaaccgttgaaggagttagggtttccttataagatccatatagtgaaagatcatgatatgaagagagagattatgtcctgaagattgagaaggcttggtcctagtgctgtgattatgggaanttacanggtttgggtgctgagaaaaaaaa

SEQ ID NO: 17097 - DNA, 421 bp, Arabidopsis thaliana
  Clone ID: LIB35-049-Q1-E1-C4
gaggtttaggcttaaagaaacaaattgttggaatctcaattctcgaatctgacatctcggagaagagatatggcgacagagtcatcggaatcggaagaagaaggaaagattagtggaggaaactataagctaatcatagacgacgatctaagagagatgggtaaaaacgcagcttggagcgttagctcttgtaagcccggcaatggcgtcaccactctccgcgacgacaatctcgagacttattggcaatcagatgggttacaaccacatttgattaacattcaattccagaagaaagtgaaaactgcagttagtggttttgtacgttgactttaagcttgatgagagctatacaccaagtaaaatctccaatccgagctgggtgatgggtttcataaccttaaaggagaattaaaaggtg

SEQ ID NO: 17098 - DNA, 415 bp, Arabidopsis thaliana
  unsure at all n locations
  Clone ID: LIB35-049-Q1-E1-C9
aagaaaccaaagcgaaatcaaaaagctcagcaattttccagatttctctaattgacgatggcgctttgtgctactactcaaaggactatccgtatagcggcgacgctccggcgtgttgctcgacctttcgctactgacgcggtggttgagtcggattacaagcgtggtgagatcggtaaggtctccggaatcccagaggagcatctttctcgcaaggtgataatatactcacctgctagaacagctacccagtcaggatctggaaaactcggaaaatggaagattaacttcgtctccaccttaaagtaggagaatccgttgatgggatggacttctacaggtgacccctatgctaatgttggggactctgctcctgcctttgagtcncaaaaaaangcgcaaatctctttggcgg

SEQ ID NO: 17099 - DNA, 413 bp, Arabidopsis thaliana
  unsure at all n locations
  Clone ID: LIB35-049-Q1-E1-D9
atttctctctgcctctctttctctcttcatatttcccggtgcttcgtcgacgttaggtcttttccgttgacggaggcagatttcttcgattctctttaaaccggcggtccatgtggtcttaccgacgagaaaaccctaatttcagggattagatagctttttgaaacaaattagagcaatgaacacagagagagctcaagaaggtgataggaacgatgccgcatcttcctctggctgctccgagtcctacgagtttagccacgcagccgctaaagctgcagtagctcangtctgcgagagcgttgggtacgaagaatttcaaggatccagctctcgaatctctatctggattcgcactccagtacantcttcagctangtaaaaccgctaattcccttgcgaaacnaaaaggg

SEQ ID NO: 17100 - DNA, 308 bp, Arabidopsis thaliana
  unsure at all n locations
  Clone ID: LIB35-049-Q1-E1-F1
ctcacactctctcttatctcctttcctttcattgtagttaacgaaaagattacgataatggcaacatcagctatccaagcaatcctccttcgccggccaaacggctctcaagccctccaacgaactcctccgcaaggttggtgtatccggtggtggccgtgtgaccatgcgtcgtaccgtcaagtctactcctcaaagcatctggtacggnccaagaccgtcccaagtacttagggnccattctccggngaaatacaccgtcctacctaaccggagaataacccgngngactaagggtgggaaaccnc

SEQ ID NO: 17101 - DNA, 377 bp, Arabidopsis thaliana
  unsure at all n locations
  Clone ID: LIB35-049-Q1-E1-F10
tcagccggcgatcagagtcaaacgaacgattaccagttaaagataaagaaaagcaaaagcgttccaaacgcggatcgtgcggcgtcaagaagctggagtttcagcgatccagaatcgcggaggaagagaagagtcgctggctacaaagtttattccgttgaacagaagatggagggatccattcgaaagagcttcaaatggttcaaagacattatcggtatttcttgatataccttctctcaactttcttaaaatctcttctttgtgctgtgagagttaaatatatctgtaacgaacaaaaaattgatagtattttctttctcttgcaactatatgtagaagaagagtctttgaactttgaatgaggacangataat

SEQ ID NO: 17102 - DNA, 52 bp, Arabidopsis thaliana
  unsure at all n locations
  Clone ID: LIB35-049-Q1-E1-G4
ctgtttacgcctgcccgtaccggcccaaaattcccgaggtcnacccacgcgt

SEQ ID NO: 17103 - DNA, 310 bp, Arabidopsis thaliana
  unsure at all n locations
  Clone ID: LIB35-049-Q1-E1-G9
tctggagtagtttctcgagccatgaccgcaaagaacgctgtgttgcaattgagtattcacgaggagagaaccaggaagaaagcgcttgtcaccgtttttcgattttcaggagttacttcgataacaatggacaaaagtgggaaaatgacaatagttggagaagttgatgtaccaagctgtcgtgatgaagctaagggaagctatgtaacacagagatcgtttcaagtcgatgatgttaaaccacctgttaaaaagcctgnacctgagaaacangctgaaaccattgcanagcccgttccgagagnaactt

SEQ ID NO: 17104 - DNA, 246 bp, Arabidopsis thaliana
  unsure at all n locations
  Clone ID: LIB35-049-Q1-E1-H9
gacctgaaatctctaaggaagaagaaagaatgaacgtagacgaagagattcanaaactggaagaagagatccatcgtcttggttctcgtcagaccgatggctcttacaaggtgacgtttggagtgttgttcaatgacgatcgatgtgccaacatctttgaagcattggttgggactctgagagctgccaagaaacgcannataatcncattttaaangngnantttttccctccnagggttttcca

SEQ ID NO: 17105 - DNA, 248 bp, Arabidopsis thaliana
  unsure at all n locations
  Clone ID: LIB35-050-Q1-E1-A1
ccatttcttggcttacaacaacaaatcttaaacgttttactttgtgctgcactactcaacctcaatggccgcctcaacaatggctctctcctcccctgccttcgccggtaaggccgtcaagctttcccccgcggcatctgaagtccttggnagcggccgtgtgacaatnatgaanactgttgccaanccaaangggcccaatcaaggcagcccatnggtacggatncgaaccgtgttaagtactttgg

SEQ ID NO: 17106 - DNA, 416 bp, Arabidopsis thaliana
  unsure at all n locations
  Clone ID: LIB35-050-Q1-E1-A3
ngggataatcagtgacgtanagatcgaagacgatgatgactctgcatccgccatgaaagctgttggatttttgcttctgcttaccattctaacattagcttatgcgaagaagtcaggtgatgtgacagagttgcagattggtgttaagtacaagcctcagaaatgtgatctccaggctcacaaaggggataagatcaaggttcactatcggggaaagttaactgatggaactgtctttgattcaaagttttgagagangtgaccctantgagtttgagccttggaactggtcaagtcatcccaaggatgggaacaagggttaattgggaagcttgtgttaggtgagaagagaaaagttgaaaatcccatccaanncttggntatggtgataacggntcaccaccaaaaatccccgg

SEQ ID NO: 17107 - DNA, 390 bp, Arabidopsis thaliana
  unsure at all n locations
  Clone ID: LIB35-050-Q1-E1-B11
tcacttgaaatgtctacatgctcacaatataaaaggtgttccgaaatctgaatggcattgctcaagatgtgtgcaattatacaatggcaagtcttttcctcctaaatacggccgtgtcatgagaagcgccactacagcaaaaatgtcttctagtacagccgaagttcaattacccgcagagaagggggttggtaaaatggatcaaaaggttagtcaagagggaatgccacatctcgagacagcaaaaccaactaaggattcagctatggaacaaacagttgaagctgaagatgtagctatgaatccaatagttgaaaaagctatgagtgaaatggtggaagctgaaggtgcagctattaatccaatagttgaanctgaaaatggggctct

SEQ ID NO: 17108 - DNA, 415 bp, Arabidopsis thaliana
  unsure at all n locations
  Clone ID: LIB35-050-Q1-E1-B3
cgagaaaccgacagaangggcttgttttcggggggcatttcctgctacaacggcacccgccaagtatcatgtgggacagctcatgttgtggccttatcagaggaaggccttcttcaagcttggggctataatgaacaaggccaacttggtagaggagtcacttgtgaaggactacaagcacctcgtgtgataaatgcttatgcgaagttccttgatgaagcacccgagcttgtgaagattatgcaactttcatgtggagaataccatactgctgctctttctgatgcaagcgaagtttacacttggggattaggaagcatgggtcaacttgggcatgtttctcttcaatccggggataaggagttaataccaaggagaatcnttggtctccnatggtgtgtccatgaaaagaant

SEQ ID NO: 17109 - DNA, 372 bp, Arabidopsis thaliana
  unsure at all n locations
  Clone ID: LIB35-050-Q1-E1-C10
aaccaaaaaaaaacacctccgatctcggcgagagaaagagaaacgatctgtgagagagaatggatcagatcttgaacaaggtangctcgtactggttaggtaagaaggcgaacaagcagctcgattccgtcggtgacgatatcaactctttgtcttcgagcatcgaaggaggaacaaaatggttggtgaacaaaatcaaaggaaaaatgcagaagccattgcccgagttactaaaggagtttggtttgcctgtggggatctttccacgtgatgcaaccaactacgagttcaatgaacaagacgangaagttaactgtctttattccatcaatctgcgaaagttggttacaaagatacatcagtcttgngatt

SEQ ID NO: 17110 - DNA, 80 bp, Arabidopsis thaliana
  unsure at all n locations
  Clone ID: LIB35-050-Q1-E1-C12
cgcgcccctntancgggcgcattaancnccggcggggtgttgggggttacaccncancgttacccgctaaaaatttccaa

SEQ ID NO: 17111 - DNA, 450 bp, Arabidopsis thaliana
  unsure at all n locations
  Clone ID: LIB35-046-Q1-E1-E2
gaagagatcgagagaagaatagtttgatcatcttgtgagaaaaataatgggctgcttcagtgatgctatcttcggtgacattgaaaccaagctggtttcacggtgganaanacggcggctanaggattaccgtcgctcacaagagctcgtccctccttcaaaattgtcgccagtggcgtcaagaagatnaagaccgacaaacccttcggaattaacnggcagcatggactttnggggacggcgtcnacgcctccnggcaaaaaaggcaaaggaatacggtgtttacaagtnacttcgacaantntgganccnaacctncaanggattcantcctaattacaaccaagaaccaattggtcaaccaattgttaaccttttcnaagggaaggantcccccgaatttgnaaaatttgggccnggtaaccccccccggaattcctngccggaagt

SEQ ID NO: 17112 - DNA, 497 bp, Arabidopsis thaliana
  unsure at all n locations
  Clone ID: LIB35-046-Q1-E1-E3
tggtccctggccgtnccggtccggattcangggtcgaccacgcgtccgcccacgcgtccgcccacgcgtccgcccacgcgtccgtacggctgcgaaaagacgacagaaggggttcacagagatttgaaaccggaaaaacattcttatggccacaatgtcttcttcgtctcctatcaaattggctgattttggactggcaacctatataaagcctggcgaaaagctgagcggaacagttggtaagtccgttttatataaccccggaagtgttagcagggggatataaccaagctgctgatggctgccgatttgagattttctgcagagccatggggacaatataacttcatacgccaaggatttgattcgcnggatgctttgtgtggatccttccaaaggttatcagctgacgaagttctaactcactcttgggttggagcanttatctgaaatcaaggtccagaaacataatgatnaaggatgggttttggttgtna

SEQ ID NO: 17113 - DNA, 378 bp, Arabidopsis thaliana
  unsure at all n locations
  Clone ID: LIB35-046-Q1-E1-E4
gtccgagtagtcacttaaccggagatcggagactcatcgttgcaacaacaacaaatttcaagaagatccgaagacgaaacgatgcctataagtgcgacaatggtcggagctttgctgggtctcggtacccagatgtactccaacgccctccgcaagctcccttatatcgtcatccntggnacangtggtgggtatgggacttggtgctgtgtttgcgaaaccacctccgtgnaaatgggatgttgaaccttanggaanttcttgatgtgatgnctcncctaaggctaaancctgctaaattaaccgccnnttacttngataaacattcgggattaaattttgcgtggatctttgaagtcctccagaaaaanaaatacc

SEQ ID NO: 17114 - DNA, 401 bp, Arabidopsis thaliana
  unsure at all n locations
  Clone ID: LIB35-046-Q1-E1-E5
agtagagattgataaaaaaaaaatgagtagctccgattctcctcagcttcacaatatcttcgtctatggtagctttcaagagcctgacatcatccatgtcatgcttaatcgtattcctgagattgtctctgcaacacttcctggctttaagagatttaggcttaaaggacgtttgtatccatgtattatcccctctgagaatggagaagttcatggaaangtactaatgggattgactaatgatgaacttgagaatgtnnattgggttgaangaaacgantatganagaantgtttgttgaagttgtaaganaagacaanttctgaagaagatgananttggaaacatatccatggatnacccaagaatgatncctgatattggtggaaaaatgggaattt

SEQ ID NO: 17115 - DNA, 407 bp, Arabidopsis thaliana
  unsure at all n locations
  Clone ID: LIB35-046-Q1-E1-D8
cggacgaggagaggaagatgaatcttgagagagacacgtgtcctggttttatatcggacggtttagggagagtcatttggacgaacggttcttacagacagttggtggttgggaaagatcatgagcagtgtggtaagatgagtgtgtggcttgtgatgaaggagaagcctttggtaacgtaccggacttttacgtgtacaatgagattgcagtacacgtgtcgtgataaggaggtgagttcgattacttcgttctgtgatgtttggangatgagtgacggtggctttgcgtggcggcntgatgttgatgctgcactttgccttggacggtgaggattgggccgttggattanagatnatgttaggattgatgagatgacgatatttaataacggcatgcaaggttan

SEQ ID NO: 17116 - DNA, 444 bp, Arabidopsis thaliana
  unsure at all n locations
  Clone ID: LIB35-046-Q1-E1-E6
accacaacaaacacaaaaatcaaaaggggtcatttactatcttttaagagacgacatatatagttctcgaccaagaaaagaaaagggggtgacctgagttcttcaacacataacataatggccggagtcttcaaaacggttacgtttcttgttttggttttcgctgccgttgttgtcttcgcggaggactacgatgtttggtgatgatacggaatgggacgaagaactatgggacccganttccaatactactnggctaccggtaaaactttccgttgtangcgaccaactcnaattttgattcccctgctggggaagcctgattgttggcagttgtttcaagaannctgcaatttnaaaaactgtnangaaagaagaaacccaattaaccantcctcccantgcccggtngggaacncaacanccttncagggcttaaccggg

SEQ ID NO: 17117 - DNA, 414 bp, Arabidopsis thaliana
  unsure at all n locations
  Clone ID: LIB35-046-Q1-E1-E8
cgaccttttttctctcacttacccaataagagcttttttcgcgttttccaccgcaaccaccgtcaccttcaaccgccggagccgccgcagggaaggctcatcatccgccgtggcaattttttgaggtgtacaaagcattgcctatttgacgaaccaggaaatggttaaaaggcatggagagttttgatttacaagatatatcatgtcgcagtgcatagacggtttcaagcatgtatgctcctcttttttccggtgttttgatatccgatatttacaaaacaatctggaggccttggtgaccctgaacttccttgcgaagagagacagtttttaagcgttgaggtgaaatanaagctctccaangagctgtttaagaaaatcaanaatgnctgttaattgatgatggggctaant

SEQ ID NO: 17118 - DNA, 391 bp, Arabidopsis thaliana
  unsure at all n locations
  Clone ID: LIB35-046-Q1-E1-F11
gtagagaggagaagtagaaatcgataaaggngaagaaggaatcgcaaggaangaaagaaacttgagaggaagatcatgatcctagctgtgttgttcgccaattccgttgggaatgttttaatcgaaaggttcaatggagtaccagctgaaggaacggctccactgggcgatctttccttggttaaagttgggaacaagataaatctcaaaaggcgttaaaaatgaggagcttctccgttgcttgccacaagtcggtttatatcgtgtacacaatgctaagggatgttaagcatcttccttgttggcaaaagacgagtatgatgaactttcctttggcaaaaaccatcctatatcataacagcggctgttaaaagaccttatgtgggaaaan

SEQ ID NO: 17119 - DNA, 469 bp, Arabidopsis thaliana
  unsure at all n locations
  Clone ID: LIB35-046-Q1-E1-F2
aacggataaaataatttgctcggcttcctcagctccaatggcggcgacgatgatcggaattaacctctcctgcttcaaatcaacatcgttcttctcaccggacctcaattctctccaatcaaagctctctctcctatctctcaaaccctctccaacacagccacggaaatcaacagtcatccgtatgggcggtggtccgagaactttccccggcggtgtatcaaaaatggcaatggaaaaggatgcaagcgaaagaaacaagaaacagccttctcaaaagcaanggttatgcaagaaaaacgtcaggttctaacgaagattgcgaaaaaacgcncccgaanttaaaaacccgccgggttggnttaaacctangaaacgaaccaatgggaaaccgatttcataaaccanccgaatctaattcccaatttngtgcctgatgancnantttaaagttccccccgggtttcgg

SEQ ID NO: 17120 - DNA, 382 bp, Arabidopsis thaliana
  unsure at all n locations
  Clone ID: LIB35-046-Q1-E1-F6
tctgggatctgatggaggggtgaagctatactggggcatagctgctgatggatcatgttagtccagctgctaaggaggttctcgaggtttggttggagcggtgtgtgaaggaagaagaagagaagattgtggttggggaagaagagagaatggagttggagagaagagataaaagctttagaangaagagcatagaggacgatttggatttgcagtttccgagaatgtttggtgaagaagtttcctcccgtgttgtacacgctattaaagaagctttcggtgttctctaaattatgtaactatatatatacatcagttaatgttcattgtactaaacatttactttcatcaatgtcacaagaacgcaaagatgancatcaaa

SEQ ID NO: 17121 - DNA, 433 bp, Arabidopsis thaliana
  unsure at all n locations
  Clone ID: LIB35-046-Q1-E1-F7
ggtgtcttctacagatcaatattgatctccaacactctctggttcccagatcttcttcaaccttataccctagtttcgcaatttcattctcattttctccgctcttcatctctttcgatcaaccaatttacgacatggatgaggttgtcgttgaagtggagaagacgaagagagaatgggaagaagcgtacgagaagacgattggacatattatctcgattcaacagtacggtaaatcaaggaggggagatggaggagaagagaagttttcgttacagaggctcaacgggattgggctcaggatcgtctctctcttctcaattcccttcaattcaatttggatctgctcgcaactccgcttccctccngatgatcaaggtcaatccactcantcactcccttgaaacgttggaagaatcaatatcacangttt

SEQ ID NO: 17122 - DNA, 384 bp, Arabidopsis thaliana
  unsure at all n locations
  Clone ID: LIB35-046-Q1-E1-F8
ggctgcgagaagactgacaatattatctttttcgaattcggagctcaagtttgaaattcggagaagctagagagttttctgagatggctcgtactaagcaaacagctcgtaagtctactggaggaaaggctcctaggaagcagcttgctacaaangctgcacgtaagtctgcaccaaccactggangagtcaagaagccccatcgttaccgtccaagganctgttgcactacgtnaaattcctaagtacagaagagtaccgagttgctgatnaggaagctccctttccaaaagctanttcntgaagattcccangatttcaangactgacttgcgtttcccagaaccatgctgtgccttgcaactccaaggaaggctgcctgaa

SEQ ID NO: 17123 - DNA, 427 bp, Arabidopsis thaliana
  unsure at all n locations
  Clone ID: LIB35-046-Q1-E1-G12
gacacacaaaaacaacagtggngctactcacaagcttgaccaactggttaactccgacgactctcttcctcctcctcaatttcacgatcgccaccattttcatcaccaaccggttcagttcctgttcaagaaaacacaacccgacgagactaaccgggtcgacccgatcgacaaggatcccggaggatgacgtcacgaccgaacctagattcggagctccatcactcttgcatgcgggtgaaatccataaagcttccttctttatacaagatccgacccagatccaacaccanaagtgcaaacacatacgaggacganatcggagtcgagtaaancggcgacgaagaagnagaagnangctacaaagaangatgatgaaatctgctagccgagagacacatcggccgggaagaagangagacagttg

SEQ ID NO: 17124 - DNA, 422 bp, Arabidopsis thaliana
  unsure at all n locations
  Clone ID: LIB35-046-Q1-E1-G4
ccaaaaggacgtgactggactcacggtggctacttctataagaatccacatacagggttttgggacactcctctacaagctgagaatattctcaaggattttgtcaagttcaatgaatcccgcttaagagagttacggtgcaaagtccatgatcctatcgtgcttggagagggtgcgggtgttggatacttgaaaggagcaagatgctatgcctattccccgaggattcaactctgtatgaccttgtgcaaatgggaattaagancactcatgcagctgttaatgtcnttgtgcgactttagaaaaagaactcncantttgtnaaaaatgtnncaatgttgattgtatccattaatatancanttgggttaaattcanccgagtttgaanaaccccgtacaaccgggttcctggccgaacta

SEQ ID NO: 17125 - DNA, 432 bp, Arabidopsis thaliana
  unsure at all n locations
  Clone ID: LIB35-046-Q1-E1-G7
aatcggaagaaaggagaagacgaagatgtcgttggtatggttggaagcgatgttgcctctcggaatcatcggtgggatgctctgtatcatgggcaattctcagtactacatccacaaagcttatcatggccgtcctaagcacatcggccacgatgaatgggatgttgctatggaaagacgcgacaagaaagtcgtcgagaaagctgcagctccttcctcatgattcgctttatctcttttgtgttcctccggggcttaaggtgaccacttgtggcgacaaataaagtgcattccagaagaanaagaanctgggggatntantactttcattcccatttgattttccttggacatattaaagctttcagaaatcaagacctcaataacatttggtttaatcnatatttcctccaattccgtgataatttgtan

SEQ ID NO: 17126 - DNA, 397 bp, Arabidopsis thaliana
  unsure at all n locations
  Clone ID: LIB35-046-Q1-E1-G9
tgagcgctcttcactcttagcaancacgagcacaggaaaatatgagcgaccctagcggccaatcttcaacaacgactgtcggtggaattgccggcggtagcggttgtaacggaggaggtggtggaagtggcagtggaagcggcggctcctttgggaatcagccgaggagatcaaaggtgaggaagcaagtgtgggctggagtactcggcatctcatccgactccaccaacaattaatagtttcttctttctttctcttttcacctaagaaatcatgtgtagtgaaaaatggtggtggtaattactatgcttgatcatcgtttcatgttaactgtgtctaaatancaagcaaganatatattanaccancaccatcgtcattgttatnagattatatg

SEQ ID NO: 17127 - DNA, 402 bp, Arabidopsis thaliana
  unsure at all n locations
  Clone ID: LIB35-046-Q1-E1-A11
gatctgacgaaagagttcaagagcttcttggtcactatccaggcaaccccaaagctaagaggaccgggaagtgtggttaagtgtcacttaaaatatgagaggattgacgagaaggtggctcctccggagaagctgctcgagttgtttgccaagctaaccgaatcaatggacgaaatgcttttgtccgaagtctagaggattccttggannnnnnnnnnnnnnnnnnnnnnnnnnnnnnnnnnnnnnnnnnnnnnnnnnnnnnnnnnnnnnnnnaatgtgctttctctatgaagagatctgaactgcaagtattgcagagtttgtgttacgtatgtttgaagtttttaattaagttgcaaattataacaaanaanaaaaaannnnnnnanaaaaaaaaaaanc

SEQ ID NO: 17128 - DNA, 431 bp, Arabidopsis thaliana
  unsure at all n locations
  Clone ID: LIB35-046-Q1-E1-A2
tatctgggacactttcgatttctgaagttgagagacgactatggcgacgaacaatggtgatgtcttgatgttggaggcgacgccggaggctgcgaggccctgggctagtgcggcgaatgcagaagttatcgatgcgcttccttatatagacgacgactatggcaatccattgattaagtcggaggtagaccgtttggtggangaagagctgcgtcggagctctaagaagccaactgactttctaaangacttgcctcctcttccgaagttcgattttaagaactgctccgttcttggcaaagagtatgancgtgttagagctgggaaaccctcctgtgccggatanaatttcnaatcccgatacaaacttgaaatgccncctgccaataaanaaggaatgatgaatgctgccttggaaaccantatccttc

SEQ ID NO: 17129 - DNA, 448 bp, Arabidopsis thaliana
  unsure at all n locations
  Clone ID: LIB35-046-Q1-E1-A4
tgtcataaaaccaaaanaaaaaaatagtgaagacgacgaacctttgaggacacacttcggtttctccaatccttcatatgatgtcggacggaggagcaccgtcgaagatacgtgaagttgacgaaggaacaaagctccggtcgatgaagattcatcccgggtgaaactcaaatcagcccattngaagtttcctcaatcctagctgttcacaaatgcaatgagtgtggccaaactttggcctgaanaattttgaagctcctgctgatnanccctgggactaaccggaatattccggntncnactgaggggacatgaaatannttttgggctgggaacnttttccggcccaaggtgttccnattttggaccttgttcgatnnaaaactcccgaaatnaacnnanggaaacctncgttgggaanaaaagncatggtcctttgcccantccc

SEQ ID NO: 17130 - DNA, 345 bp, Arabidopsis thaliana
  unsure at all n locations
  Clone ID: LIB35-046-Q1-E1-A6
ggtggtgcctaacatctccaagatggacaangcttcgctccttgcagacgcaatcacttacatcacggatatgcanaagaaaatcanggtgtatgacacagagaagcagataatgaanaggagggagagtaatcagataactccagcagaggttgattatcaacagacgcatgatnatgcagttgtaacgctaagctgtccgttggaaactcanccagtttcaaangtgatacaaacgttgaggganaatgaagttatgcctcatgattccaacgtggccatcacanaggacggtgtggttcacacattcactctccgggcctcagggtggctgcaccgctganc

SEQ ID NO: 17131 - DNA, 484 bp, Arabidopsis thaliana
  unsure at all n locations
  Clone ID: LIB35-046-Q1-E1-A1
cgtccgcgagaaagacnacagaagggtacggctgccaagaagaacacagaagggggcgccaaaaggaaaaatggatatgtccgcttgcgttatccaacggcaccaaatgagtaaggacgattatcccctgccacganggcggtcccaagtttcacaaacctaaagctaaagaaaagtcaagcccggcgaaataagccggncaacgatgtcgacaaagcggtttctccggcgggaacgacaaaaggagttgacttgggaagtgcgttagaaagttgtggaancntgctgtaagaatgcaaaanggacttttcctttgcaacacctgacgaaatcttccacaacccctgnatgaatgtttaanctgttatccaaagcaagaatcggagatnattgggatngtntccaaaactaccnaccaaagcctacacgccaaatggcnccaatttaagcccggtncgtcccaaaaatttttgtccggggttna

SEQ ID NO: 17132 - DNA, 411 bp, Arabidopsis thaliana
  unsure at all n locations
  Clone ID: LIB35-046-Q1-E1-A8
ggacagtccttttgggaacgctgcgcttcttgctgacgtgggtaggtacgaaacaatgcgatccctttggatgtcgtcttgtgaagtaacactcggtggctgcaagaggctcgcgcagaattcgccacggcttaacgtagagatcatcaacgagaatgagaataatgggatggaacagaatgaagaagatgaaagagagaaggttgataaactttacctctaccgaacagtggttgggactagaaaagatgcaccaccatatgttaggattctttagtctctttgcaccttcatgtgttttcaaacttttctttgtactaagtttttgccttttatcaaacttggaacaaatacaaatgtcgcattttantatcacccgtaattcanccatttgaaaaacataagtttang

SEQ ID NO: 17133 - DNA, 419 bp, Arabidopsis thaliana
  unsure at all n locations
  Clone ID: LIB35-046-Q1-E1-A9
agagagagtttcttctcatgctctttctaccaaggagaagattttctcgttaattttgtttgacttgcctcttcgaagcaacctgattctgtggtctgaatcttttcaagggaagagaagataagctaaacaagagaatggtgacangttgtgttgatcttcatcaatctttcaaatctgcagattcatcttctgtgccaattcctcntcctcttccatcaaaatctgatggactcaagaaaaaacttgggcatagcancgtttcgacagccacaagagatatgtgggatctcntttcaatgacgggatacanagctgatgtantcatctatacagaataatggcaantatcatctatctcaagccaacatccttggaaatgcctccactgtgatcaaagggcatnttgaaaccaaccc

SEQ ID NO: 17134 - DNA, 392 bp, Arabidopsis thaliana
  unsure at all n locations
  Clone ID: LIB35-046-Q1-E1-B11
tggctcgggttcaagagctattgagtgagctaaagccacnnnnnnnnnnnnnnnnnnnnnnnnnnnnnnnnnnnnnnnnnnnnnnnnnnnnnnnnnnnnnnnnnnnnnnnnnnnnnnnnnnnnnnnnnnnnnnnnnnnnnnnnnnnnnnnnnnnnnnnnnnnnnnnnnnnnnnnnnnnnnnnnnnnnnnnnnnnnnnnnnnnnnnnnnnnnnnnnnnnnnnnnnnnnnnnnnnnnnnnnnnnnnnnnnnnnnnnnnnnnnnnnnnnnnnnnnnnnnnnnnnnnnnnnnnnnnnnnnnnnnnnnnnnnnnnnnnnnnnnnnnnnnnnnnnnnnnnnnnnnnnnnngtcaaatgatctcattccaaaaaaaanannnnnnnnnaaaaaaaaaag

SEQ ID NO: 17135 - DNA, 415 bp, Arabidopsis thaliana
  Clone ID: LIB35-046-Q1-E1-B12
ggaagagaatggcgaaggaagcggtcaagtatgtatgggaaggagcaattcctctgcagattcatctccacaaatccgacgtcgcttctcaccctgctcctcctcctgctcttgtgttagcaccaagaataggatatttgcctctgttgattcctcttataaagccttatttcaaggattcacttcctcctggtgaagattcaatttggtttgattacaaaggatttcctctaaaatggtatataccaacaggtgttcttttcgatctcctttgtgcaagaacccgaaagaccatggaatctcacgatacactttagaggatatccttgcaacatactgataccatgtgaaggagaagattctgtaaaatggaactttgttaattccttgaaagaagcacaatatatcatcaatg

SEQ ID NO: 17136 - DNA, 418 bp, Arabidopsis thaliana
  unsure at all n locations
  Clone ID: LIB35-046-Q1-E1-B8
tacattagtcgaccgtcgcgcattaatactggtgtggtggttccgttaacgagcaacggcgatgaagagacctcgacctacatctcaagctgtcgatctcttccaccgtcaaaccaccactgtctccgccggtcacaccgattctcaaacagaagctacacagaacaggaacacctaaatggttcccgttaaaactaacccacacggagctgacgttgccgttaacttttccgacgggtcaaacattccggtggaagaaaactggagcgattcagtatagcnggaacgattgggcctcacttagtctctcttanacaacgtcgaggagacnacgcagtttcctactgcgtccattgtncgcacnngcccnaantccngcggagcttgccttgggtccattttctcaatgcctgaaatt

SEQ ID NO: 17137 - DNA, 426 bp, Arabidopsis thaliana
  unsure at all n locations
  Clone ID: LIB35-046-Q1-E1-C1
gcaaagactaaggagaaaagaaattcttcgcttcttctccggtgtaatcatgacaacctcaaaaagactagcagacaggaagattgagaaattcgacaagaacgtattgaaaagaggatttgttcctgagaccaccaccaagaagggtaaggattaccctgttggtcccatcctcctcggcttctttgtctttgttgtcattggatcatctctcttccagatnatcaggaccgcaactaagtggaggaatgggcttaaacccaatcacattcaagctgggaaaaattgcaaattctcaaattgatgaatcaacactttcctccncctcctgactttgncccttttttcccctaanaccngtagaaatgtgacaacntccggttgnccaacatggttaantgaaaagaaattttttgantccctttt

SEQ ID NO: 17138 - DNA, 423 bp, Arabidopsis thaliana
  unsure at all n locations
  Clone ID: LIB35-046-Q1-E1-C2
acacataaaaaaatgagtcaacacaacatcttagaagctctaaatgtccaggtcgtgggtacgggtgatcggatcctgtttttggcccatggattcggtactgaccaatcagcttggcacttgatccttccttacttcactcaaaactacagagtcgtcctctatgacctagtttgcgccggcagtgtcaaccccgattacttcgatttcaatcgttacacaactctcgatncttacgtcgatgatcttctcaacatcgttgattcactcggaatccaaaactgtgcttacgttggtcactccgtttcccgctatgatngggaatcatcgcttcgattcgtcggccggagctttctccaagcctanccttgatcgggatttcnccctaaggttctcaangaacgaangattatcaagggaagg

SEQ ID NO: 17139 - DNA, 363 bp, Arabidopsis thaliana
  unsure at all n locations
  Clone ID: LIB35-046-Q1-E1-C4
ttgaggtttttctcttcccctgaatcgctgtgctcgttgtgagagagtgagagatgtgtcctcgagctactcaaacatgcgaaatctgcgagaaggttgtatccaaatacaagtgtccttcttgtcttgttccttactgctcattgggttgtttcangatacacaaagagactccatggtgctaaaccgtctgatcttcttcaacccgaagaaaaagccagcttctccaagcaanagggaagtcccgggtgaaaaaagacctgttggaaacctaaatngatgtttgtnanagaaggacacagcaaaaaaggctanttgcctngcaatctccaaccgaaaggaaaattccggtaagcaaagnac

SEQ ID NO: 17140 - DNA, 443 bp, Arabidopsis thaliana
  unsure at all n locations
  Clone ID: LIB35-046-Q1-E1-C5
agataaagaaagttggaaaatggcaaaccctagaagagtagtgatcgagaaccagagattgtcacctttaatcaacctactgaagaagcctcaagcgattcctctgcttctctcgttgttcctcttgctcacatggatctccctcaggttacaacactcttcacaatcacacgtctcttcgtcctcttcacatccgaaatcgacggtaaatagtcatcccgatttgaaagtttacgacgacgacgataaggctaatttggtccggttcggtttggcgtcgctttctcctgctcggaaagacgaaccgtngttggttgcttgattccgttaacccttgcctccgtgaattctgancctcaaaaggttgganccnnaatcctgttgtttccaatcaatggttgggtgaaataacgggccttgnttgaattgaaggggaaaaccan

SEQ ID NO: 17141 - DNA, 530 bp, Arabidopsis thaliana
  unsure at all n locations
  Clone ID: LIB35-046-Q1-E1-C7
tttcgcctggccctaccggtccgganattcccgggtcgacccacgcgtccgcccangcgtccgcccacgcgtccgtacggctgcgagaanacgacanaagggtacggctgcgacaagacgacagaagggtacggctgcgagaagacgacagaagggtanggctgcgaagaagacgacagaagggtacggctgtgagaagacgacagaagggtgtccaaaaaaaaaaangnnnacanaaaaanaaaaagcggccgctctagaggatccaagcttacgtacgcgtgcatgcnacgtcatanctcttctatagtgtcacctaanttcaattcactggccgtcgttttacaacgtcgtgactggggaaaaccctggcgttacccaacttaatcgccttgcaacacatccccctttcgccaagctgggcgttataacgaaanaaggcccgcaccggattgncccttccnaaacnaatttccccaaccctgaaatggccnaattgggancccgccttgttancggcgcaattaatc

SEQ ID NO: 17142 - DNA, 402 bp, Arabidopsis thaliana
  unsure at all n locations
  Clone ID: LIB35-046-Q1-E1-D7
cgtcttcaattggcatctgaagaagaagaagaagaagaaaggagccatggcaatgtttagatctatctccatggtaatgctgctcgtcgcactaagttacattcatttctatggtttcttctgctgcttcgtccccagaagccgactttgttaagaagactatctcttcccataagatcgtcattttctccaaatcctactgcccctactgcaagaaagctaaatcagtgttcagagagctggatcaagttccttatgttgtcgagcttgatgaaagagangatggttggagcatccagactgcacttggagagattgttggaaggcgancagtaccncaagtcctcattancggaaaacatctccggaggattaagntnaaaccngtagatgcgtatgaga

SEQ ID NO: 17143 - DNA, 408 bp, Arabidopsis thaliana
  unsure at all n locations
  Clone ID: LIB35-045-Q1-E1-A11
atgagcgctcttcactcttagcaaccacgagcacaagaaaatatgagcgaccctagcggccaatcttcaacaacgactgtcggtggaattgccggcggtagcggttgtaacggaggaggtggtggaagtggcagtggaagcggcggctcctttgggaatcagccgaggagatcaaaggtgaggaagcaagtgtgggctggagtactcggcatctcatccgactccaccaacaattaatagtttcttctttctttctcttttcacctaagaaaatcatgtgtagtgaaaaatggtggtggtaattactatgcttgatcatcgtttcatgttaactgtgtctaaataacaagcaaagaaatatattagaccaccaccatcgtcantgttatgagattatatgaaanttat

SEQ ID NO: 17144 - DNA, 77 bp, Arabidopsis thaliana
  Clone ID: LIB35-045-Q1-E1-A3
gacctttaaaccatgtaatattgtcgtgtttcctttgtccagttctcccgagggaaacgattttggttacttgtgca

SEQ ID NO: 17145 - DNA, 212 bp, Arabidopsis thaliana
  unsure at all n locations
  Clone ID: LIB35-045-Q1-E1-A7
tggggggaagaagaattaagaccttgatgcatagctgaagtccattcctttttctcatggacttgaatgtgtatgtttgttatgtataagaagaatacagaagaaatgtttttacnttggagtcttgtangtggatatgttgttgtnatattggagatgtggcttaaggaattgtaactgaanaaaagaancaatgaaaaaaaanannaaag

SEQ ID NO: 17146 - DNA, 428 bp, Arabidopsis thaliana
  unsure at all n locations
  Clone ID: LIB35-045-Q1-E1-A8
tgacgacgtcttagctccacttaaccttgaagatatctcaaccaagctgcctccaaaatcaaccggaaccgaaacagtccgctcaaccanggtctcttatctccgccagacacgcaggagagagactcctaagaagctggggaggtggaaccggctggatagtggaagatgcaaaggacaaaatctcgaaactcctagaagaataccaancaggatgagtaacatcagaagcttgtcaatgtatccgcgatntaagggatgccttttttcaaccacgaagtagtgaagaaagctttggtgannggcaatgganaagcagaatgatcggttactgnatctgctttangagtgtttttgtgaaangattgantncaactaanccannntgaccnaaagggtttgggccgctgttaaccaacagcctcnat

SEQ ID NO: 17147 - DNA, 419 bp, Arabidopsis thaliana
  unsure at all n locations
  Clone ID: LIB35-044-Q1-E1-H6
cacgtgaaatcggatccaatcgatgattccggcgaggaggtttctcttatctccatttgtcggcgtcacgtttatcgtcgttctcgtctccctctacttcagatcttccttcaagtctccacaacaccaatatcaanagaggttatttctgctgaggaattgggcattgtataatggtactgatgaaacattacctatactcttagggattcttggatctgtgttcgatgtgacgaaaggaaaatttcattacggtagtgganganggtacaaccattttgctgggaagagacgcttctcgtgcatttgtttccgggcaactttacaaggagatggacttacaagattcgntacaaaggggttaatctagcantgaggtgaanaagcantgttgactggccaaggttccnactccaaga

SEQ ID NO: 17148 - DNA, 52 bp, Arabidopsis thaliana
  unsure at all n locations
  Clone ID: LIB35-045-Q1-E1-B1
ataactctgtttnnnnnnnnnnnnnnnnnnnnnnnnnnnnnnnnnnnnnnng

SEQ ID NO: 17149 - DNA, 431 bp, Arabidopsis thaliana
  unsure at all n locations
  Clone ID: LIB35-045-Q1-E1-B2
gccgaanacgaatangaagattaattgaggagaaatcgangatgtctatagcgttagtggagaagattcaagccaaattttgaagaagtctagtagattctgtattgtaagctactaaantctgcgatggtgaggcatttcaatcgtcgccggaaaattcatcggagatattaaaattgaatcaagcttcgaattggtcaaccgatcnatattgagtgatccacaggacgaanccgagatgtatgtggtttacgcaaacagaaccgaggatgacattcttgtnagnggaagaactagaacggatgggctagtangcattaangannggctaaagattttgggtacctcgttgaaatcccananggaaaggttgganttacaataccgggntttataactgaatcctgtgcctagggaaacatatccctgaa

SEQ ID NO: 17150 - DNA, 403 bp, Arabidopsis thaliana
  unsure at all n locations
  Clone ID: LIB35-045-Q1-E1-B5
ccacggcttgtgttgtggcttaaacacagaaatggcttctttaccgttcggagtttcgaatctatgcagaaatcaggaggttctgtctgcgtctgtaaggcttcttccggttgggcgacaaaccacaggattcggagctgcgaagaaagtcttatatanatttgagggacatagattgtcatcatcagtagaaaagggagagaaacagagaatgagatgtagagttagctcaaactctactgaaactgaagacgattctgctacaaaaaccaagacgacgccgtttggttacacgaggaaggatgttatattganaggagtgggagtgactgcacttggtatcgggctananagtggacntgagtatntggganttgatccgttgcaagcggggaatgcagnt

SEQ ID NO: 17151 - DNA, 390 bp, Arabidopsis thaliana
  unsure at all n locations
  Clone ID: LIB35-045-Q1-E1-C6
ataagacctagagtctctctgtttcgcttttcataaatcttgaagaataaatggaaaaagcttcaaacagcaacaagtccacgaaattctcgaaaatgcttcaaagagcgatgtcaattggtcacagtgcggcgccgtttagtccacggagagattttcatcagcaccgtacgacttcgacggcgaacagaggaatcttcttctccagtccgttggttcctacggctgctagagttaggagaaatacaaagatacgaagccgtttttgcccgaacccacttcgcctaaagtctcctgcatcggtcaggtcanactccgctagaccctaaatgtccggagaaggagaacaaaggcacctaaggaatcncaaaacgggaatcngtctttaac

SEQ ID NO: 17152 - DNA, 427 bp, Arabidopsis thaliana
  unsure at all n locations
  Clone ID: LIB35-045-Q1-E1-D1
agagggtcatcagctaaaagtgaagctcaagacaagggtattagcattataaggctacgtgcagatctccagaatgccattgacagtgaggattacggtttggcagctaagttacgagatgaaatctcaaagcttgaggcagaatcattagctgtatctgcgaaagccttggcttttgagaaagcagagtatgcatttcgtttgggacagaaacttagacacaaaacttttggttaccgggctgtagtgtgtggtatgggatccaatttgcagtgaatcaagctcttggatggaagctgcagaggttgaaaagttacctccgtgggattcaatcagccattttatcaggttctaatcnatgtttcggacgcacccagatctactantggcataagttgccgaagacaatctggttaaccncctgaaa

SEQ ID NO: 17153 - DNA, 275 bp, Arabidopsis thaliana
  unsure at all n locations
  Clone ID: LIB35-045-Q1-E1-D8
gattgtaagggagctcactggaggtatttactttgganagccaagaggcattacgatcaacgaaaatggcgaagaagtcggttttaatacagagatctacgctgctcacgagattgacagaattgctcgtgttgcattcgagactgctacgaaaaggcgtggcaagctgtgttctgttgacaaagccaatgtcttggatgcatcaatattgtggangaaaaganttnacaagctttagcctctgaatatccacatgttggactatcacatatgtt

SEQ ID NO: 17154 - DNA, 414 bp, Arabidopsis thaliana
  Clone ID: LIB35-045-Q1-E1-E7
aaattgtaatctttgtcaaattttgtttattttgagtttcttagtgaactcagttggataacagtgacacatatgagatttgagatgaatttattttctggtaaatgcatagagattattaatgtttcttactgatttgagaattgcaaggcattgtcctttgagtttggtgttaaagttagcaaattggtgactatctctattgagtttacatgttttcttggttgttattgtgaggatttaagatttgcctgcttttgtatttctctttggtcttgtaatgtcagaattgtttctttcttaaagttgatttctttgtcaatctttaaacaagagatcgaggtgtttttgacgcaatagaagatcgttctgcgtgttattatccaagaactgctttagtggttataaacattt

SEQ ID NO: 17155 - DNA, 416 bp, Arabidopsis thaliana
  unsure at all n locations
  Clone ID: LIB35-045-Q1-E1-E8
ggaaagagaacgagagaggtacgtagaanaaaatggctgccttatcagagaaagaggctgaagcttatctcgacgcaaggcctagatatccgatcgattggtttaagaaaattgccgcacggacacaggaccacaaatttgcttgggatgttggaactggtaatggtcaggctgctattgggcttgtggagcattacgagaatgtagtggctaccgatataaacgaagcacancttcancgagcantcaaacactcaagaatcagttaccatcacactccaacaacgatatcagangatnagatggtggatctactcgggggagaaaactccgtggatctcatagttgctgctcaanctgtccatttcttcgacctcaancgtattttacaatgttgcagaacgtgttcttccgna

SEQ ID NO: 17156 - DNA, 433 bp, Arabidopsis thaliana
  unsure at all n locations
  Clone ID: LIB35-045-Q1-E1-E9
gtacgtcttttgcataagaagaaacagagagcattatcaattattaacaattacacannnnnnnnnnnnnnnnnnnnnnnnnnnnnnnnnnnnnnnnnnnnnnnnnnnnngctttggccacgacggcaccgttagctccggtcaccagtcagcgaaaagtacggaacgatttggaggaaacattaccaanaccatacatggcaagagcattagcagctccagatacaagagcatccgaatggaacagaaaggtcacgatagcaanaggaatgagtgttatgcaacaacatgttgctttcttcgaccaaaacgacgatggaatcgtctatccttgggagactataaagggatttcgtgaccttggtttcaacccaatttcctctatcttttggaccttactcataaacnttagcgtttcaactacgttacacct

SEQ ID NO: 17157 - DNA, 84 bp, Arabidopsis thaliana
  unsure at all n locations
  Clone ID: LIB35-045-Q1-E1-F9
gaatgaaaattgatagaatatatgccttttcnnnnnnnnnnnnnnnnnnnnnnnnnnnnnnnnnnnnnnnnnnnnnnnnnnnng

SEQ ID NO: 17158 - DNA, 414 bp, Arabidopsis thaliana
  unsure at all n locations
  Clone ID: LIB35-045-Q1-E1-G2
tcgcagtgaccaggcccgggcgactgtttaccaaaaacacaggtctccgcaaagtcgtaagaccatgtatgggggctgacgcctgcccagtgacgaaaggcttacaaatggtggtgacgtctttctcttcancgccgcctatcttcttcntacctggagctgatgctcanttttcttcttccaatggaangtttgctattccttcctcttctcgcgtaaagggactaanaagacaccgagatgcaaaattggtgggcaatagagccagagttggagtaatacgantcctagccanaccaantgtatctcctcctcctcctccatgaaaancnacangtcaacaaagaggtaattcatggnagancctcnttgaaagctaaacngttanctantaagcaaatgtgnagagattaa

SEQ ID NO: 17159 - DNA, 427 bp, Arabidopsis thaliana
  unsure at all n locations
  Clone ID: LIB35-045-Q1-E1-H10
gagaaaaagagatggaaagaaaaaagttttcttcaaaatttattcatttgctcattgtgtttttgcttctttgtacgtttctttctcgtaccgaatctgctcttccttatcaccatgaactgttcttggggaggaagcggatgaattattataagcccaacagtgccataggaacaccatcatcaactagtgaccacgctccaggcagtaatgggaggaagttgatgagtatatataagacccaatggagacatatttacaggaccatcaggcagtgggcatggtgggggtcgcactccagccccctagtatatatatattaatgtgtaatcaagggactcacaagcgaagcttttaattctcgatcacgtataacgtatgcgttggtgtagtaaatgtttaaatttcngttttcacaagcccaagt

SEQ ID NO: 17160 - DNA, 87 bp, Arabidopsis thaliana
  unsure at all n locations
  Clone ID: LIB35-045-Q1-E1-H11
gttgtgtattgttataagactcaatttatatttctttaaaaagccttattatttgtgtnnnnnnnnnnnnnnnnnnnnnnnnnnnnn

SEQ ID NO: 17161 - DNA, 427 bp, Arabidopsis thaliana
  unsure at all n locations
  Clone ID: LIB35-045-Q1-E1-H3
cgttcgaaattccgaggagaggaatcataccatggaatcgcaccacgcgtctctaggtcgccgtactttggaagagattcgtcaaaagagagcagctcaaaggctaagcaaagcttcttcaggtccagatcttagtgaaattcccaatcctgccgatttcccagtgatcagaaaatctgagagcggaaatcgactttctgagacagatgttggtgctttanattcccagcttaaagaactgcagaanaagaatgcagaaatggacgagcgcaacaaaattttgtcttcaaagcttcaaacgaangaagttgagaatgnatcactgagactcggttngaatgtgctggaacaanaacacagtgccatctttgagaaaagccctcaanggaaattgcaatgggagaaaganctgcctgttgtttttacg

SEQ ID NO: 17162 - DNA, 421 bp, Arabidopsis thaliana
  unsure at all n locations
  Clone ID: LIB35-045-Q1-E1-H9
ttanaagctggtgccacagctttgggtattaccattatggatgaaatggcttacagtataaacncgagaaaatgcgcattatgggactccgaagaaacccgattgctttcgatagagtgcctgggggatcatcgagtggctcagccgtagctgtagctgctcgtcttgtggatttttctattggaactgataccggagggaagtgtacnagttccagcatcttactgtgggattttcggtttccggccatcccacgggtgcagtttccactgtcggacttactccantggctcatagcttcgacacaagttggatnggtttgctcgggacacagccactttgaaacgtgtangttgcgttctcctgcagncagcatcacttganccccatcgaaccatctcaaactggaatatcgcgggnt

SEQ ID NO: 17163 - DNA, 538 bp, Arabidopsis thaliana
  unsure at all n locations
  Clone ID: LIB35-042-Q1-E1-E2
gtaactgtttattcatgccgcccantnctaagaacgnggntcnncccaancctctacacatgactcctnntaacgcgtccgtacggctgcgagaagacgacagaagggtacggctgcgagaagacgacagaagggtacggctgcgagaagacgacagaagggtacggctgcgagaagacgacagaagggtacggctgcgagaagacgacagaagggtacggctgcgagaagacgacagaagggtacggctgcganaagacgacagaagggtacggctgcnaagaagacgacagaaaggggtacggctgcgaagaagacgacagaaaggggggaaaacgaaaacgaatttatgggattttgaaagaaaagcatccttttgtttttaatccttccttcctcctggtcctccaaccttgcaaacttgcnaacaaccaacttttgcctcaacgccnggtcctccgccnattctttcaaaccaaagtttttaanccccttccgntttgaattccaaaaaccaattgaattgaattctnccccc

SEQ ID NO: 17164 - DNA, 435 bp, Arabidopsis thaliana
  unsure at all n locations
  Clone ID: LIB35-042-Q1-E1-E4
anacatgactcgtattaacgcgtccgacagaagggggtcgtgcgatacagttctgggtttgctgaagaagactctggaaaaaagttcatccatcacaattgattcgtgttcttgaaacgaatctatcgattcaaacacatgaaacattcggtgaatcggcctccgacaccagatgaagacgatgtggcggatggtttcgagaaagacaaggtcacgcttcgagaaatcatcaacgtcaagttggtggagagtggagagaangagaatctaatggagcttgtgagagatagattggtggagtgtggttggaaagatgagatgagaattgcttgcagggaacatgttaaagaagaaagggagaaaagatgttacagtcgatgaactgattcgagtgatcactcctaaaanggcagagcttcaantacaagattcctg

SEQ ID NO: 17165 - DNA, 421 bp, Arabidopsis thaliana
  unsure at all n locations
  Clone ID: LIB35-042-Q1-E1-E8
gacagaagggggtacaagtggaattttgaaaaaagaagcagagagcgatggagagagtggttgatctcttcggagtcggagaagctaattcccagaagctactcgaaggaggcaaagatctcagcgagatccaacagggattgttcataggatcagtagctgaagcgaataacaaggattttctcaaaagctctaatatcactcatgtcttaaccgttgctgtggccttggctcctccttatcctgatgattttgtctacaaagtcattgaagtggttgatagatccgagaccgatttgacagtatatttcgatgagtgttatagcttcatcgaccaagctattcaatctggtggtggtgttttggttcattgcttcatgggaatgtctangagtgtgactatantgggtggcttacctga

SEQ ID NO: 17166 - DNA, 445 bp, Arabidopsis thaliana
  unsure at all n locations
  Clone ID: LIB35-042-Q1-E1-F10
caacnccctatagtgacgtcgtattaggctgcgagaagacgacagaaggggacaagcgaaaagaaaaaagttaagcgaagaagacgaaagagagaaaattttaggtttttgatttttcaatggcgacgacgacgggacacgagagatcaaagactcttatcaatttctcgttaccgaagttgtgggggactcaacatccgaaacagagtcttctatcgcagtcgctaagcgtcacattcacggagaatccacagccaacggcggtggtcacattgcaggagcagcaattgacggattggattacttctccggtgacgcgacggttcggaatcggcgccgggtttacctgggctgggtttttagctttcggtgttgtctccgagcagatgaagaagtcacgactcgatgtgtttcaggaagaggataacacaagaggtttagaaaa

SEQ ID NO: 17167 - DNA, 416 bp, Arabidopsis thaliana
  unsure at all n locations
  Clone ID: LIB35-042-Q1-E1-E10
nagacagaaggggactcgccaagaagtttcctttcctttgattgcacaactaatctcaaactaaaagatcttctctttaggcatacccagatctttctctctctaaagtctccacctttcacggttttttgcttctcacctgaatccaatcaatctcgccggagtgaattcaccttcctccggttgactcgtcggacttagtccgacctttcaattcgtagattctgtttacaattcactgatcgtttgattagaaatgggttacttgttcttctaagtctctctttagctgaaagtttgttgctttacgactcttcgatttacccttacttgttcaagttcttcatcaaattcgtagttatggcgataagaatcactttcacttactccaancatgttgctcggaatctcgtcgg

SEQ ID NO: 17168 - DNA, 428 bp, Arabidopsis thaliana
  unsure at all n locations
  Clone ID: LIB35-042-Q1-E1-F3
acnacagaaggggaccatagaaatgaatctgatcatggatctaaacatgaaaagagtaatgttacacgagcttgtgagtatttttgaagaagaaggagctcaagtaatgagtgctaatcttcagaacttgaatgataggaccacttacacaatcatagcccaggctatcattagtcggattggcattgatccatcaaggatagaagagagagtacggaaaatcatctatggatatatatattttgaagcatgaaatcccaaatgataagtctacgctaacgctagtgtgttttttcacacatgtgttagttctttaaatatgagatgagtaattgcttttgagttcgattatgataaatatgttgaccgtcaacataagaaaccttaaaacgttgtcgtttcgtttttaatcatcccngtttaaatca

SEQ ID NO: 17169 - DNA, 409 bp, Arabidopsis thaliana
  Clone ID: LIB35-042-Q1-E1-F4
tctttcttcagagaaaaacaaaaaacagagcattttttttggtcaagagcaagaaaaaacagagcatacttttgcaaaaagcagagcttggagcgctttcttgtcatctaaaattcaaaggcagagacgatgggagatgtagttttgttcatagatgaaacatatttgaaatcgagttttaatcgctgtagaatctgtcacgaagaagaagctgagagctactttgaagctccttgttcttgttcaggaaccatcaagttcgctcacagagattgcatacaacgatggtgtgatgagaaaggaaacacaatttgtgaaatttgtctccaggagtataaacctggatacaccacaacttcaaaaccatctcgatttattgaaacagcagtcacaatcagagataattaca

SEQ ID NO: 17170 - DNA, 111 bp, Arabidopsis thaliana
  unsure at all n locations
  Clone ID: LIB35-042-Q1-E1-F6
agagatcgaagagaagaatatttgatcatcttgtgagaaaaataatggctgcttcaattatgctatcttcggtgacattgaaacaactggttcacggtgganaaggcggcc

SEQ ID NO: 17171 - DNA, 446 bp, Arabidopsis thaliana
  unsure at all n locations
  Clone ID: LIB35-042-Q1-E1-F8
caancctctatactgattcgnaataacgacagaagggacaaggttgttgaagtgaatcctatcagtaagaaagaaatcaaatggtctgattataagaaggtgcctattcttactgtagatggtgaacaaatggttgattcttcagtgataatcgatagcttattccaaaagatgcaccctgaaatttccaagtccgaagatgatgaagagactaaatggcgcaagtgggtggacaaccaccttgtgcatcttttgtcaccaaacatatacaggaatacttcagaggctcttgagtcctttgaatatatcaccacacatgggaatttcagtttcactgaaagattagtggcaaagtatgcaggagcaacggcaatgtactttgtatcaaagaaattgaagaaganatataacattacagatgaacgtgcggctctttacgatgctgc

SEQ ID NO: 17172 - DNA, 439 bp, Arabidopsis thaliana
  unsure at all n locations
  Clone ID: LIB35-042-Q1-E1-F9
gcntccgtacggctgcgagaagacgacagaaggggggcaagaaggcaagaacagtttttatcgcaattgagtcttgaagaccacaaggatttgatcacattggtgcttctgcctgtttatctgagtttgaggacaagaacttctggggcgtttataatttgccatggctagtaatgagaatctaccacccaatgttatcaagcagcttgccaaggagctgaagagtcttgacgaatcccctccagatggcatcaaggttgtggtaaatgacgaggatttctcacaaatatgtgctgatattgaaggaccaattggtactccttaagagaacggacttttccgtatgaagttggccttgtcacgtgaatttccaaatttcgcctcccaaangctacttcatgacaaaagatttccancctaatgttgcttccaatggaaa

SEQ ID NO: 17173 - DNA, 504 bp, Arabidopsis thaliana
  unsure at all n locations
  Clone ID: LIB35-042-Q1-E1-G1
taactgttttttctgcccgccncannaccanagaatcgngtggtcgncccaanncnctatactgattcgtantaacnacagaaggggccaccactgtgactaaatctaaacaatttcatggcgagtctctgtctctcatcgtcccggatcgtttctcttcaccaccagaaaccattcctctctcttaaactccggtctcgtccttcagatctctccggtctaggtcgccacacgagtcctgtttgcttcaatccgcttaggttatcgggtgatcgtcagcgaaccgctacggtatcaacgagggtggagaagcggcgaaagagangatcgagtgtggtctgttatgctgctccgatttctgccaatagtctacaatggatctccacatttcttgccttgcantgatgccttgcaangggtactgggtatacataagtcagttgttgttccactaattcgctctccaagcaaccaatcgagcatccgtcncctgggattaaaggg

SEQ ID NO: 17174 - DNA, 404 bp, Arabidopsis thaliana
  Clone ID: LIB35-042-Q1-E1-G10
agagagacccatccctcacttcaaagttcaaagtctcgaaggatcttctccaactctctctaaacaagattccaaattttcaaaggtgaatttgtttgatagaatcaagaacaaacctttaaaatggcgcatctactttcagcttcatgcccttcagttatctcacttagcagcagcagcagcaagaattcagttaagccgtttgtttcagggcagaccttcttcaatgctcagcttctttcaagatcttctctcaaaggacttctcttccaagagaagaaaccgagaaaaagctgcgttttcagagcaactgccgtacctataacccaacaagcaccacccgaaacatctaccaataactcatcctctaaaccaaagcgtgttatggtcattggtggagatgg

SEQ ID NO: 17175 - DNA, 400 bp, Arabidopsis thaliana
  unsure at all n locations
  Clone ID: LIB35-042-Q1-E1-G5
agagaaaaaccctaatcttcatcttcatcttctcccgccgtcggccgtaagaggtttcgaagaagcaaagtgagcaacaatggcgggaggcaagatcaggaaggagaagcccaaggcttcgaatagagcaccatcgaaccattaccaaggaggaatatcgttccacaaatcgaaagggcaacatatccttaagaaccctctgcttgtggattcgatcgttcagaaagctggtatcaagagtaccgatgtgattctcgagatcggtcccggtactgggaaacttgaccaaagaagcttccnagaaagctggcaaaagaagtttatcgccgtccgaactttgactcctccgttatgggttctccaagccttaancngccgtttttcaaagggaaantcccct

SEQ ID NO: 17176 - DNA, 418 bp, Arabidopsis thaliana
  unsure at all n locations
  Clone ID: LIB35-042-Q1-E1-H5
aaccgaccgagtcggagatcgaagttttgaacctaagnnnnnnnnnnnnnnnnnnnnnnnnnnnnnnnnnnnnnnnnnnnnnnnnnnnnnnnnnnnnnnnnnnnnnnnnnnnnnnnnnnnnnnnnnnnnnnnnnnnnnnnnnnnnccattggcttcttcttgagatctcgtcaggctctgatcccaatctatgttcgatctcactctcaccgagatctcatcttcctccattttttcaaagatccatatatgagctctaaaaccacagatttcaatctgtgaatcccgtatatatgctcaatcggagccagattctaacaaatcaaaagaaaggaaagaaagaanttgaagaacaatgggagctgaaaagaaatgggntttcaaaatccntcccctgtagtaatccccctcaagtgtt

SEQ ID NO: 17177 - DNA, 325 bp, Arabidopsis thaliana
  unsure at all n locations
  Clone ID: LIB35-042-Q1-E1-H6
agacggaagaaaattcgaatcatcagtgtttgtttcctcctctcttaaagcttagcccttctcaggtcattgttcttcaatggcttcgagcaacacgactactggggttgataatacgtttagaaagaagtttgatgtggaagagtttaaggagcgtgctcgtgaacgcgaaaagaaggaatcggatcggtctaaatctcggtccaaaggtcctcctgtgcaaagagcccctttgaagcatagagattatcatgtagacctagaatctcgtctgggcaagacacangtcgttacaccggtagcgcctctaaatcagcaggctggt

SEQ ID NO: 17178 - DNA, 414 bp, Arabidopsis thaliana
  unsure at all n locations
  Clone ID: LIB35-043-Q1-E1-A1
ggcgataaggcgagaagaaccacgtccacgacaacctccggtatggcgtcatcttacgtcacctactcaacggtcactccggtggtcagcagcagtaacattcgaggagtctttcgtttggcattcacgcgccgccgtgttactctatcgccgaatgctcggaggagaatattgagagtttcggcgaaagcgtcgacgaagaatgctatggagtataggaaattaggagattccgatctcaacatcagcgaagttactatgggcactatgacatttggggagcaaaatactgagaaagaatctcatgagatgctgagttatgcaattgaagagggcatcaattgcattgacactgctgaagcttatcccataccgatgaanaaggagacgcanggttaaaccgattctttanat

SEQ ID NO: 17179 - DNA, 404 bp, Arabidopsis thaliana
  unsure at all n locations
  Clone ID: LIB35-042-Q1-E1-A9
gtactgtagacgtaaaggagaactctacttggtgtatgactttatgcccaaaggaagccttgataagtttctttataatcaaccaaatcaaattcttgattggtcacagagattcaatatcatcaaagacgtagcctcgggactctgctacttgcatcagcagtgggttcaagtgattattcacagggatattaagccagcaaatattcttcttgatgaaaacatgaacgcgaagctcggtgattttggacttgcgaagctatgtgaccacgggattgactctcaaacctcgaatgttgcaggtacatttggatatatatcaccggagctgtcgagaacagggaagtcaagcacaagttctgatgtttttgcatttggantgttcatgttggagattacntgcg

SEQ ID NO: 17180 - DNA, 208 bp, Arabidopsis thaliana
  unsure at all n locations
  Clone ID: LIB35-042-Q1-E1-B10
cgtccgacggctgcgagaagcgacagaagggtacggctgcgagaagacgacagaagggtacggctgcgagaagacgacagaagggtacggctgcgagaagacgacagaagggtacggctgcgagaagacgacagaagggtacggctgcgagaagacgacagaagggttactgnnnnnnnnnnnnnnnnnnnnnnnnnnnnnngcggcc

SEQ ID NO: 17181 - DNA, 434 bp, Arabidopsis thaliana
  unsure at all n locations
  Clone ID: LIB35-042-Q1-E1-B11
anagtgagtcatattacgacaggagggggccgtcaaaggttaaacagtcgaaacaatggagattctgaagcttgatgtagcgaagtttccagaaattgaggatacaatcgaattaactaacccaaagagaaacgacgaagtagaagattgcgacgaccaacagaagcagcagctagctacacaagaagatgaagaggaagacgaattgagaaagcttctgctttcagatattggagaacttccgatttctcctccttcagctacacaagtcaattttgtttcttacttcatcacagattttactaaatcgggtcatgatcaatatatttaccgtcacgctaatggtttgtgtgtaattggattggctcctacgcatatagcttttaaggatgaaggtggaatcactaagtatcgatttcaatgttgggaagtcc

SEQ ID NO: 17182 - DNA, 392 bp, Arabidopsis thaliana
  unsure at all n locations
  Clone ID: LIB35-042-Q1-E1-A7
gcaacaatggattttttcgacgaagacaggcctagattcgttttccaatctcgtccttcttcttctcacacggcggaggaagaagaagaagctagaatccctaacaagcttttcatttcaatctccgtctcaatctccctcatcatattatctctctccttcttctacttcgaatctgaacctgccaaatcgctactattatggctttccctctctttcctcgtcggtcctttcgctcctaactccgctcaccgggaggtacgattcgtgtcngttatgggcaagatcttgggnnccagaaacagattcncgatgagtcatncacggattacgaacgtttnatccnggaggaaatcggtgaataancgatctaaagggtcgacgaanagcga

SEQ ID NO: 17183 - DNA, 482 bp, Arabidopsis thaliana
  unsure at all n locations
  Clone ID: LIB35-042-Q1-E1-B12
tccacccagcacggcacnannccatgaactcgcgggtcnncncaagcctctanactgatncganataacgacagaaggggatgtcgagacaaaatgcaggcatacacactaccattcgtattcggagaattattgcgggtatcggtgttgaaattgtgtttcccatatactctcccaacatcaaagagataaaagtggtgagtcacaggaaagtaagaagagcaaggctttactatctgagggacaagcttcctcgtctgtccactttcaagtgaacaccatccaccgtgctgtgtttgacctccagaggtagtaatcttccgcattgtgctctttttttgtaagaattgtttctttctttcttttttttaagcctgtaagtcattccctgcacattttctgagaaagtaaattaagattagttgaacttccggttgatggatgtagacctgttccttgtttgataatgaatgatatatggc

SEQ ID NO: 17184 - DNA, 513 bp, Arabidopsis thaliana
  unsure at all n locations
  Clone ID: LIB35-042-Q1-E1-B2
antgttatttcaagccggccccactacngngaatcgtggntcgncncaacncnctatantgagtcgtattatccacagaagggggccgtttctgttttaacaaaacaagtatcaggccgttccaagcgttcactaacgacacgacgtttgtttatgaaccaaaaagacgaatttttcaaaacctcgtcggagaggtttaggcttaaagaaacaaattgttggaatctcaattctcgaatctgacatctcggagaagagatatggcgacagagtcatcggaatcggaagaagaaggaaagattagtggaggaaactataagccaatcatagacgacgattcaagagagatgggtaaaaacgcaacttggagcgttagctcctgtaagcccggcaatggcgtcaccaactcctccggcgacgacaatctccgaagacttattgggcaatcagatggggtttacaaaccacattttgattaacattccaattcccagaaagaaagttgaaacctgc

SEQ ID NO: 17185 - DNA, 443 bp, Arabidopsis thaliana
  unsure at all n locations
  Clone ID: LIB35-042-Q1-E1-B3
acagaagggggctttacgaaagcttttgtgggaacaacagctacgcgttttgccgtgctgcctgtggagtgatccctgaacagcggcacatggcagttcctgtgccccttgttggagcagcgcttggtgttggcgtgcaggtgtatgccaatgccgtgcgcaagctgccgctgatgcggaagccctggctacatgttctgtgcggcagcgcangctacggcttcggctcgtggctcgtggaatttgaaagcaaagacgcacaanggacttgactgaaatgttgaagaatcgcgagaaatgcgaacnaagcagctggcaaccgttgacnacatccttgcgcaacgaacatgcatgcctgaaangggggcaanccancaancaagccaanccttcanaaaagccaccggcacacatcaactgnccctcgcaaatcngtttaaatg

SEQ ID NO: 17186 - DNA, 477 bp, Arabidopsis thaliana
  unsure at all n locations
  Clone ID: LIB35-042-Q1-E1-B4
caaagaaacgngggtcgacccaagnctctatactgattcgnaataacnacagaaggggacccatttcttggcttacaacaacaaatcttaaacgttttactttgtgctgcactactcaacctcaatggccgcctcaacaatggntctcccctcccctgccttcgccggtaaggccgtcaagctttcccccgcggcatctgaagtccttggaagcggccgtgtgacaatgaggaagactgttgccaagccaaagggcccatcangcaacccatggtacggatctgaccgtgtcaagtacttgggtcaattctctggcgaatcaccgagctaccttaccggananttccccgggagacaacggatggganaccgccgggcctttaacctgnaccccgaaaanattcccaanggaaccntnnactaagaanttanccacangaaggttggggccaagncccggaacccctaagggtgngt

SEQ ID NO: 17187 - DNA, 369 bp, Arabidopsis thaliana
  unsure at all n locations
  Clone ID: LIB35-042-Q1-E1-C1
ggtcgcagtgaccaggcccgggcgactgtttaccaaaaacacaggtctccgcaaagtcgtaagaccatgtatgggggctgacgcctgcccagtgccggaaggttaaggaagttggtgacctgatgacaggggagccggcgaccgaagccccggtgaacggcggccgtaacgataacggtcctaaggtagcgaaattccttgtcgggtaagttccgacccgcacgaagggcgtaacgatctgggcactgtctcggagagaggctcggtgaaatagacatgtctgtgaagatgcagttgaagcattcgctagacgaaatgtaccgagtcatggcattcgcccgaagcacattttttctgatgatgcntcca

SEQ ID NO: 17188 - DNA, 431 bp, Arabidopsis thaliana
  unsure at all n locations
  Clone ID: LIB35-042-Q1-E1-C10
aaagtnaatcgtatgagggggtcgcagtgaccaggcccgggcgactgtttaccaaaaacacaggtctccgcaaagtcgtaagaccatgtatgggggctgacgcctgcccagtgccggaaggttaaggaagttggtgacctgatgacaggggagccggcgaccgaagccccggtgaacggcggccgtaacaataacggtcctaaggtagcgaaattccttgtcgggtaagttccgacccgcacgaaaggcgtaacgatctgggcactgtctcggagagagactcggtgaaatagacatgtctgtgaagatgcggactacctgcacctggacagaaagaccctatgaagcttcactgttccctgggattggctttgggcttttcctgcgcagcttaagtggaangcgaagaagcccccttccgggggggcccg

SEQ ID NO: 17189 - DNA, 483 bp, Arabidopsis thaliana
  unsure at all n locations
  Clone ID: LIB35-042-Q1-E1-C11
tattctccctgntccctcaatnctagnnctcgnggntcgtcgcaanncnctanactgactcgtantatgcgagaagacgacagaaggggacagactctggactctgaagaagcaaatggctgggatcaccagcaccgttggattcaacgccattctcgccggagccaccaaaacggtgtcgcatcctgttaaatctaagctctttggtcttcgactctgtgtacccgaattctcaattgtttctctttccccttatcatcatcgccgttgtcccgccatcacttgccgttacggaggcggtggtggcggaggctctagatttcccggcgataggagaggtaggcagaaagaatccgaggatgatgattcgcttaatatctcagctattaggtcagccactgttaggcttattgatgatcaagcagaacatgattggtttagtttccaaagaagaagctgttcgaagaactgaagatgctgagc

SEQ ID NO: 17190 - DNA, 394 bp, Arabidopsis thaliana
  unsure at all n locations
  Clone ID: LIB35-042-Q1-E1-C6
cacgacgtcgtcttcttctcactttgaagacgttcttgattcgtttcatcaagagatcgacaacagaaatttccagttttctaacccaaaccgcatctcgtcgctcagaccggacttaaccgaacagaaaaccgggttccacggtcttgcggatacttctaacttcgattgggctagttttgccggtaatgttgagcataataactcggtaccggaactcggaatgagtcatgttgttcctaatctcgagtacaactgtggctacctgaagacggaggangaagtcgagagcagtcacgggtttaataactcgggcgagttaactcaaaagggttatggtgttgactcgtttgggtattcggggcaagttngtgggtttggggtttaagtgaag

SEQ ID NO: 17191 - DNA, 382 bp, Arabidopsis thaliana
  unsure at all n locations
  Clone ID: LIB35-042-Q1-E1-D12
tcaccggttgttatatcgtcgattcatcgtcgtcgacggcgagtacttgtgacctccacacccagattaatcttctataactgattttatcgcttagacgatcacgatctcatcgattaactgacaaatgaagcatgtagtaaagatcttgagcctgttggtggctatctctgccttctggattggtcttttgcaggctgcaattattcctcgaagccatacatggttgctaccgatctactttgttgtatccctcggatgctatggcctattaatggttggagtcgggctcatgcagtttcctacttgcccccaagaagcagttctgctgcagaaggatattgcagaggctaagggcttcttcaaagcacaaaggggtana

SEQ ID NO: 17192 - DNA, 497 bp, Arabidopsis thaliana
  unsure at all n locations
  Clone ID: LIB35-042-Q1-E1-D2
tactgttattctgcccgccncannactaagnatcgngggtcgncncaancctctatactgattcgnantaacnacagaaggggacataagagggaaaaggaaaatgacttatggggaggaggagccggttagcccgatggcgcgtgtattccaatcgccgggcatagacttatgtgccgtgaccatcatgggtttcaaaacaaagattaatcccgacgttgttcttgatgccttgaagcaaaatgtctccaagcatcctcgtttctccagcatactgtccgataatggtgcaaaatggatcgagaccgaagttaatgtanaaagatnatgttatttgtaccatacatagacgcggaagagataggtgaaggtgggacaaaagcttcatcgatgattatatgtcacgtctcacgatgattcctctcgatagatnaagaccttgtgggacattcacatcctaacgtcaaaacctcagangctgaagcagtcngttttaa

SEQ ID NO: 17193 - DNA, 405 bp, Arabidopsis thaliana
  unsure at all n locations
  Clone ID: LIB35-042-Q1-E1-D5
ctaaaccagaacaatatatgatcttgaaaatatatttaaaatcttttgttttctccttgtaggctttcctgttgtgtttgtaccaagcgggaaaactggcgtttttacacccaatgataagtatgatacaaaccgtcgccttctcctctcttctctagcttctcatgttgtagctcgaggtgacttctacagtaattcacttggccaagtctatgatcgggtgtatgctttggggatgttcatctcagttgttgaaccaaaggtttgctcaaactgtatcgaccttgcttccaaaagangtgttanaggaatgtaccaaccaagacaagaaaggcattgcctggcccgaaaatnggattccttggaanggtacgttactccaaaccgttcgttttctggattaac

SEQ ID NO: 17194 - DNA, 439 bp, Arabidopsis thaliana
  unsure at all n locations
  Clone ID: LIB35-042-Q1-E1-D7
gtcntattacgacagaagggggagagaatcgcantancaaaaanacaaacgaatcttttgagtttataaccctttttcacttaccggagaaatggagagattgacgccggaacatgtctcctccgcacacaagcgcataagcgtgagcttcctcgtgtctctcatggtactttgtgctagacacgcangcagagtttccaagangcttaaacccaagaagactcggaagcaaactcatcttgannactatctcgaaagccctaagtctaacggaaacggtagcgaagacggtagaggangangacggtttggatggagtccggcaaggactttttctcctatgagggtgcgtcctaaggagctctanacgaccttgagcancaaggngatgactatngntggncggaaaanacaaagcttacnacggtggtccgacgaa

SEQ ID NO: 17195 - DNA, 399 bp, Arabidopsis thaliana
  unsure at all n locations
  Clone ID: LIB35-040-Q1-E1-H4
cgacagaagagaaaaatctctagagctagcanagtaaaatcanttaatattttggagaacatcaacgaatttactcaacaactatggcctcatggtgacggtaacgagaatatcggtaanacgatccagttgtttgcgganaagtcagtggaaatagatgtgatggtgagaagaatggtaatgganagctttggaatanaaaaatacattgatgaccatctaaagtctacggcgtatgcnactgatgaagtatattgcaccacctgagggtgatgctaatactactgttgacganaatgctgatcttcttgctaagcttatantgttggngttgaacctantgttggtgttaaagtnaatgccnatattatgatgatgttnatcctaatgggaatgtta

SEQ ID NO: 17196 - DNA, 451 bp, Arabidopsis thaliana
  unsure at all n locations
  Clone ID: LIB35-040-Q1-E1-H7
gcgtccganaagacgacagaaggggacgcacaacaatagactcaaagcaaacgcaactcatatccaatcgcttttaaacgccaataatcgcgttacagtaacaactcgaaaaatggtaacactaatcgtggccaccaccgccgatccagcgtcgatcaaccctgcggcggcgcttctcgccatgcccggttggaccgccggacctatcttaccgccggacataaagagttttagtaacaagcaaacgagagtgattcaacacgatagatctatagtaaaagaagacgatctcgatttacgttgggaagaagctaccgggtgaagttgttgatgaagtcatcttcctcagccgtcacaccgccgtctcaaatcgtcctgctttaactgttcatccgatttggngtgcctcatctaaaaggattggngnatcaccgccgcaaaggaggaaagn

SEQ ID NO: 17197 - DNA, 473 bp, Arabidopsis thaliana
  unsure at all n locations
  Clone ID: LIB35-040-Q1-E1-H9
taccggtccanaaattcacgggtccacccacgcgtccgtacggctgcgagaagacgacagaaggggggagaaagtggttgatctcttcggagtcggagaagctaattcccagaagctactcgaaggaggcaaagatctcagcgagatccaacagggattgttcataggatcagtagctgaagcgaataacaaggattttctcaaaagctctaatatcacccatgtcttaaccgttgctgtggccttggctcctccttatcctgatgattttgtctacaaagtcattgaagtggttgatagatccgagaccgatttgacagtatatttcgatgagtgttatagcttcatcgaccaagctattcaatctggtggtggtgttttggttcattgcttcatgggaatgtctaagaggttttgattcttttgcccttaaatctcatacattcagttattanatttagtgtttaaagaat

SEQ ID NO: 17198 - DNA, 408 bp, Arabidopsis thaliana
  unsure at all n locations
  Clone ID: LIB35-040-Q1-E1-H3
gaagggtacggctgcgagaagacgacagaagggggaggacactgtgcagatcactacggctcattcacaggctgtgttttctgattcctacccgccttcgtcttgtgtgtttaaagagaatgttgttcagttcatgaagccattgttggagttttttcagcagattgggtctcctttttgtttgaatgcttacccttttttggcgtacacttataatccgaaggagattgatatcaactatgctcttttcaagccaacggaagggatatatgacccgaaaaccgatttgcattacgataacatgcttgatgctcagattgatgctgcttacatggccgttgcaagatgctgggtttaanaagatggaggttatgatcactgaaaactgggttgggctcctaaagggga

SEQ ID NO: 17199 - DNA, 383 bp, Arabidopsis thaliana
  unsure at all n locations
  Clone ID: LIB35-041-Q1-E1-A10
cgtgaacttggattgatagatgatagacgatggaagttataccaagagaagcaagcaaggatttcagaagagaagaagagactgaaaactgtcaagatttcagttgcagtaggtgatttggctgccgaagtttctaagtgtgtcttctcagccagtcaaagaatcagcgacactagagagtctcctaaagaaaccacatatccactacaagcttcttgagaagcatggctttggaaatgaagcattatctagaatggagaaagactgtgtagagatcgatataaaatatgaangtttcattgttcgccagcaaaaccaactgcagcanatggtccaccaacaacataagacgacttccagacgatttgggattactattcgat

SEQ ID NO: 17200 - DNA, 404 bp, Arabidopsis thaliana
  unsure at all n locations
  Clone ID: LIB35-041-Q1-E1-A11
acgtcgaagatgaagttcaacgttgcgaatccaactactggatgccagaagaagctcgagatcgacgatgaccagaaactacgcgcgttttacgacaagagaatctctcaagaagtcagtggagatgctttgggcgaggagttcaaaggatacgttttcaagatcaagggtggttgcgataagcaaggtttcccaatgaagcagggagttttgactccaggccgtgttcgctttttgcttcaccgaggaactccttgcttcagaggacatggaaggagaactggtgagaggagaagaaagtctgttcgtggttgcatttgtgagcctgatttctcctgttcctgaaccttgtcattttaaaaaaggttaagaaagattctcctggggcttaacgatactganaa

SEQ ID NO: 17201 - DNA, 322 bp, Arabidopsis thaliana
  unsure at all n locations
  Clone ID: LIB35-041-Q1-E1-A12
cgagaccgtgatcgaaacggcgatggttgaccagagtcctcgccgtgttgtcgtggcggcgctcctattgtttgtggttctgtgcgatctttcgaattctgcgggagctgcgaattctgtgtcagctttcgttcagaacgccatcttgtccaacaagattgccatcttctccaaatcctactgcccgtattgtttgcggtcgaaacgtatattcanccaacttaaggaagaaccatttgttgtggagcttgatnagagagangacggagattaaatccanntacgagctttagaantcgtttggtcgtcgtactgtccccgc

SEQ ID NO: 17202 - DNA, 456 bp, Arabidopsis thaliana
  unsure at all n locations
  Clone ID: LIB35-041-Q1-E1-A9
ntcgccggtcgacccacgcnnccgaaangactacaganaggtgttgagaaggccgaacaagacaagagaagtgccgttatccgcgcccagggagaagccaagagtgctcagctcattggtcaagcaattgcaaacaaccaagcgtttatcacgctcaggaagatcgaggctgcaagagagattgcacaggccatagcaaactcggcgaacaaggtttacttgagctcagacgatcttttgcttaacctacaagggatgaatttggatgttgatgcaaagaactagagaggtttcttaagtaaaactgcatgtgggtcattttgtcttttaagttcctagaatccgttggaacaaaagcttgatttgtactactaaatactacttttaaaatcctgggattagtctactcaanggtgaaagtttgaaaaagaagatactgtcttgctgaatgantta

SEQ ID NO: 17203 - DNA, 74 bp, Arabidopsis thaliana
  unsure at all n locations
  Clone ID: LIB35-041-Q1-E1-B9
gccgntcggcacagtaaccaagnctcgngggtcgacncangcctcnatactgnttcgaaanaacgacagaaggg

SEQ ID NO: 17204 - DNA, 442 bp, Arabidopsis thaliana
  unsure at all n locations
  Clone ID: LIB35-041-Q1-E1-C12
ancctctatactgattcgaaanaacgacagaaggggggagaaagtggttgatctcttcggagtcggagaagctaattcccagaagctactcgaaggaggcaaagatctcagcgagatccaacagggattgttcataggatcagtagctgaagcgaataacaaggattttctcaaaagctctaatatcacccatgtcttaaccgttgctgtggccttggctcctccttatcctgatgattttgtctacaaagtcattgaagtggttgatagatccgagaccgatttgacagtatatttcgatgagtgttatagcttcatcgaccaagctattcaatctggtggtggtgttttggttcattgcttcatgggaatgtcnangaagttttgattcttttgcccttaaatctcatacattcagttattagatttantgtttaagaat

SEQ ID NO: 17205 - DNA, 59 bp, Arabidopsis thaliana
  Clone ID: LIB35-041-Q1-E1-D11
gttgtgtattgttataagactcaatttatatttctttaaaaagccttattatttgtgca

SEQ ID NO: 17206 - DNA, 442 bp, Arabidopsis thaliana
  unsure at all n locations
  Clone ID: LIB35-041-Q1-E1-E10
atactgattcgnaataacgacagaagggggaagaccaaaaactagtggacaaagaaaaagaacaaaaacctaatttcaggaaattcaataaatatcatcctccggataagttgttattgtacgtttaccaaattcaagaacaagaaaaaacttttcctttgaaacaaagaaacatggatttcttcaccgatcaagtaaagaagaaattctccgacaagaaaccggagagctctgatccggagccaaaccacaacaaaaacaaacccggtcacacggagccaacaacacataaacccggtcacggcgagccaacaacacataaaccggtctccaacaccgatccgacaacacacagaccggctacgaacgctgagctcatggctagtgccaagatcgtagccgaagctgctcaagcccgctgctcgtcacgagtcagacaagc

SEQ ID NO: 17207 - DNA, 501 bp, Arabidopsis thaliana
  unsure at all n locations
  Clone ID: LIB35-041-Q1-E1-F10
nagcttttctttagcccggccccactcactaactangnctcgtngntcnncncaaccctctatactgattcgtantaacnacagaaggggacaactgaagaagaaggcaaagccctttctgatatggttgccgagaaacttcagattggaggagaagaagagaagaaggaaacgacgacaaaggaagtggagaagatctctaccgagaaggcagcatcggaggagggtgaggcggtggaagaggaagtgaaaggaggaggaggaatggtcgggaggattaaaggatggttcggtggtggtgcgactgatgaggtgaggccagaatcgccacattctgttgaagaggctccaaaatcatctggctggtttggtggtggtgcgacngatgaggtgaagccaaaatcgcctcattccgttgaagagtctccacaatcacttggctccactgttgttccggtgcagaagganctttaanantatgagaactgagattttcaaagt

SEQ ID NO: 17208 - DNA, 406 bp, Arabidopsis thaliana
  unsure at all n locations
  Clone ID: LIB35-041-Q1-E1-G12
gaaaagaatagatccgtccgagctcaaacgcgttttccagatgttcgacaagaacggtgacggtcgaatcacaaaggaagagctcaacgactcgcttgagaatcttggaatctacataccagacaaagatctgactcaaatgatccacaagatcgatgctaacggtgatggatgcgtcgacatagacgagtttgagtcgctgtacagctcgattgtggatgagcatcacaacgatggcgaaacagaggaagaggatatgaaagatgcgtttaacgtgtttgaccaanacggagatgggtttatcactgtggaggagttgaaatctgtgatggcttccttgggactcaagcaagggaagaccctaaatggttgtaagaagatgattatgcaagttgatgcanacggt

SEQ ID NO: 17209 - DNA, 497 bp, Arabidopsis thaliana
  unsure at all n locations
  Clone ID: LIB35-041-Q1-E1-H10
ctttttttagcccngcccggcacagnanctaaanactcgcgggtcgacncacgcntcngcccacgcgtcngtaaggctgcgagaagacgacagaagggggaagangaagaanangatcaaaaccatgacgagtcaccacgcgatcgaagtgacgaagacggtgctggaagtanccgacgtancatggaccgcggtggaaacttaccatcaccaccaccaccaccangacgaaattcacgagtcancgaatccaatttctgatccacganatcgtgaattagaanctcttcgtcaagagaatcgtcgtctcaggactttgcttgaatcgaatcttaaactctttgagactctcgctgantctgctgcgttctctcatgattgccctancganctctatgctaagcttgtaacgatggttacttcannagatttcttgggctagattagagantctangacaagctttatctaatggaattcagaatcaatttccattc

SEQ ID NO: 17210 - DNA, 387 bp, Arabidopsis thaliana
  unsure at all n locations
  Clone ID: LIB35-042-Q1-E1-A3
ggtcgcagtgaccaggcccgggcgactgtttaccaaaaacacaggtctccgcaaagtcgtaagaccatgtatgggggctgacgcctgcccangtgccggaaggttaaggaagttggtgacctgattacagggggaacccgcgaaccgaagccccggtgaaccggcngcccgtaactataacggtcctaaangtaaccnaaaattcccttggtcccgggttaaagtttcccgaaccccggcaccaaaaaggggcgttaaccgaattctgggggcaactggtnctccgggaanaaaaaaggcctccggttngaaaaantaanaaccaatggtcccgggttnaaaagaatttcccgggnacttaacccttgggcaacccctgggnaacaa

SEQ ID NO: 17211 - DNA, 448 bp, Arabidopsis thaliana
  unsure at all n locations
  Clone ID: LIB35-042-Q1-E1-A5
atantgactcgtattaacgcgtcngacggctgcgagangacnacanaaggatacggctgcganaagacgacagaagggcacggctgcnagaanacgacagaaggggaaaccaaagatctctcttcagagcttccaccatgtttctccgatcactcaatctctgtacaatactactcttcctagcgatttcatcacaagtttctcaatctctccacttcgaattgcantctgggtcgaacatgatgtatatcggaagacataanncagcaattcaatgaccgtcgggaagtncaccgtcgttaaccctaacgaagctcatccntctcctcaatctcacaagatntccatcagtgacatcgagttacgggaacactatcatcacgcggaagatgtagaatcnggatanttcgcgttcacggcggtggatctgggatattacatggctgtt

SEQ ID NO: 17212 - DNA, 63 bp, Arabidopsis thaliana
  Clone ID: LIB35-038-Q1-E1-D1
aataaaatgtgtgaaatgtaaaacaaaatcgtcgttaattatatatttccatctttgttgcca

SEQ ID NO: 17213 - DNA, 396 bp, Arabidopsis thaliana
  unsure at all n locations
  Clone ID: LIB35-038-Q1-E1-D10
gtacgtcttttgcataagaagaaacagagagcattatcaattattaacaattacacannnnnnnnnnnnnnnnnnnnnnnnnnnnnnnnnnnnnnnnnnnnnnnnnnnnngctttggccacgacggcaccgttagctccggtcaccagtcagcgaaaagtacggaacgatttggaggaaacattaccaaaaccatacatggcaagagcattagcagctccagatacagagcatccgaatggaacagaaggtcacgatagcaaaggaatgagtgttatgcaacaacatgttgctttcttcgaccaaaacgacgatggaatcgtctatccttgggagacttataagggatttcgtgaccttggtttcaacccaatttcctctatcttttggncttact

SEQ ID NO: 17214 - DNA, 396 bp, Arabidopsis thaliana
  unsure at all n locations
  Clone ID: LIB35-038-Q1-E1-D12
tcaggagaaaacaagataacaggattggcgtttggaggaaatagaatgtttgtgacccgaaaggatcagcagtctgttcaggtttggcaaagtcctagtcgtggaatatctatctaatgagcaagtattaagctttggttcgaggtgatcacgagttgcttaaagccgaatccaacaaaaactagttagcgacttacgttgtgttaaagaagaatgaatgatcttaatcccaatacttgatgaagctattccaaccatgaatttcttatctctgataatcttataaaaaggacttacatcgttcgtcagacgangctgtgaangatgtttgcattctaacgacatgaccttatcaagtactgcagagangaagcanatgacgatgcttggnaaaat

SEQ ID NO: 17215 - DNA, 222 bp, Arabidopsis thaliana
  Clone ID: LIB35-038-Q1-E1-D7
aggattgctgacgagtttttggacaagctggtaaagtggaccaagaacattaagatttcagatccttttgaagaaggctgtaggcttggtcctgttgtcagtaaaggacagtacgagagagttctaaagtttgtctcaaacgctaggaatgaaggtgcaactgttctttgtggaggagttcgtcctgagcatttaaagaagggatactttgttgaacctgcg

SEQ ID NO: 17216 - DNA, 376 bp, Arabidopsis thaliana
  unsure at all n locations
  Clone ID: LIB35-038-Q1-E1-C6
gccgcgctttctctctctaaacttagctcagcctatcgattaattcctctccggaataaggaaatttcacctcgatttattgattagtcggaagaattcggaaccaattctgaaccagacctgaaattttccaatggggcggaagaagccgagtgctcgaggtggagatgctgagcagcaacctcctgcgtcatctctcgttggtgctactaaatctaagaagaaaggtgctcaaattgatgacgatgagtactcaataggtactgagttgtctgaggagtctaaagttgaggaagagaaggttgttgttatcactgggaagaagaagggtaagaaaggtaataagaagggtacgcagcangatgatgatgatgat

SEQ ID NO: 17217 - DNA, 228 bp, Arabidopsis thaliana
  unsure at all n locations
  Clone ID: LIB35-038-Q1-E1-E12
tgaggagattaaagaggaagagacgaaagatgagacagcgatctaagtagattttcgaacaaacctggttttgtgttttgctttcgttgttaaatccaactctgttttgagtttcagtttgaatgtttcgttggaccaaattaanatggaagttatgttttctattatacatcttacaactgttgatgttctactaaaaaagaatccattgtncntnngnaaanaanc

SEQ ID NO: 17218 - DNA, 297 bp, Arabidopsis thaliana
  Clone ID: LIB35-038-Q1-E1-E4
agccattcaaaatattggtggcttcaaattcacctcttacacttgtagcttgtgcttcatccaattctttgcagcgattaaaacacacaaaaagtttgcatatgaattgctgactctgaatttctcaaaaagataagggcattgcttcattgatatggttaagaaatgttagttgcgtatcctgcgggaactatcaacaaattccaaatccctattagctgctatgccgctttgcgcagattcaagacctcgccttttggtcctctgattagttgttctgtctccccaagatcaata

SEQ ID NO: 17219 - DNA, 403 bp, Arabidopsis thaliana
  unsure at all n locations
  Clone ID: LIB35-038-Q1-E1-E7
gtgtgttgttgttgttggcactgtgccactttctctctcgatggaccctctcaagcaagcttcttcgatcttccgagcttagtttcgtttctaaatattcagctgttgaaatcgtgcttattgctacaaattgagaggcactaaatcagtgaggtcgtaaagaagaaggcaaccacaatgatgcagacttgttgtatccatcaatcgttttgtttccctcatanagtctttccacggtttgatgcttcgattggtattaagcccccaaagctttgtcaagttggtttcattggaaagactcaatcttatgggatttcaagtccgatacggcaaagaagattatatgtgaatttgaatgctaatgatggtcacccatccatgtctatgttggaagaagaaactc

SEQ ID NO: 17220 - DNA, 406 bp, Arabidopsis thaliana
  unsure at all n locations
  Clone ID: LIB35-038-Q1-E1-F4
agtcatggaacaacaacctcatcgaagacgacgcccaaacccaaaaaaggtctacattcggagaacattctccttgacgacgaggactcgtcggctacgggaggcatggtcacaccgccagactcagatgctccgtccaaattcaggaagccacgcgcgcaccggaagaggatggaggacttggagagcctcggtatcagtagcccgttcaagaagtcttctcgaagggccagaaccccgtttacggaccaagatgaccgcgaaatcttggaggggctggagaagtacggcccagcttggactaaaatccagcgggaccctgcctttcatctacagagcctgcagccgacagatttgagggaccgtgttcgcaacaaacacccgaggtctacaagcgcatngattg

SEQ ID NO: 17221 - DNA, 275 bp, Arabidopsis thaliana
  unsure at all n locations
  Clone ID: LIB35-038-Q1-E1-F8
ttggagaacgaaattaggtaaacgatggaggagatatttgctctgatagtctcaatgattctcatagttgcggtgattcctttgttcttttggaaacgtcggagagatgctanatcacgggaggaagttgctgaaccaccacaggttcaacctcgtgaaaacgtggcacgtgctggtggtggacggaggatgcgtaggatacctgcagcttctggtgctagctcctctacatccaatgttcaaganaacggcagtgggagtgaagatgaagatga

SEQ ID NO: 17222 - DNA, 91 bp, Arabidopsis thaliana
  unsure at all n locations
  Clone ID: LIB35-038-Q1-E1-G2
tgtttattagcccggcccannnccanagncacgngtggtcgncgcaagnctctatactgattcgnaataacgacagaagggtctttctcta

SEQ ID NO: 17223 - DNA, 478 bp, Arabidopsis thaliana
  unsure at all n locations
  Clone ID: LIB35-038-Q1-E1-G5
tgttagccgccggcacagnaccaagactcgcgggtcgacgcangcctctntactgattcgnaataacgacagaagggggagatacggaagaatcagatcaacgcatgcgaccaagtaaatcaaaatcgggttgaagaagaaagagataagctttcacatcaatttttgaaggcgcgaaatggggaatacttcatcgatgctgactcagtacgacatcgaagaagttcagagtcattgtcatgatctatttgagcagcaggagattttatctctgtatcaacggttttgccagttagatcgaaacgcaaaaggatttatatctgctgatgagtttctctctgtgcctgagtttgcgatgaatccactctctcagaggctgcttaagatggttgatggtttgaactttaaggattttgttgctttcttgtctgcgtttagtgccaangctagtctaagacagaaagttcanttgatcttt

SEQ ID NO: 17224 - DNA, 405 bp, Arabidopsis thaliana
  unsure at all n locations
  Clone ID: LIB35-038-Q1-E1-H10
accaacanataaacattaaacccaaatgatatattttggtagatcaatcgacaatcattatacaacaatgatgacaaaaacattggagattgatttgagatcagcagaagggcttaagctaaaccggagacccatcaagaaaaagactttcgccgtcgtaaaaatcgacgagaaatgtcgaaaatctaatcttgacgaatcgagaagaagcaatcctacatggaactataaatcagagatgcccatcaatggtaatgaacagtttatcttcattgaggtattttatcgaacaggttctgggcatgataaaaaaatcggagaagctaaaatcccaacgaatgatttcatgggaangtattcacctgaaggtcacttaaacttcttgagccatagattgagaaatga

SEQ ID NO: 17225 - DNA, 388 bp, Arabidopsis thaliana
  unsure at all n locations
  Clone ID: LIB35-038-Q1-E1-H11
ccggcgacgantaccttcgccggcaataatggtctctgtgtagatagatcgtgaagaagattagagaatcgaagaactcgtatcagataagctaaaatcaatgggtagccaacgacgaagatcggtgatagctttgattttcatctgctgcgccatttcttctacctcatctgatcaggttggaacaaattatagagattctcatgaatttttcgattccgatacaatttgtatctctgatcaatacattatggagtcttatttcactacatacacttccttagacgactcagagtttcgaaacttcttgcttcttcaacaatgttctgacaaagttcctactcaagattcaaacattgttcctggaacttcatttagncaacataga

SEQ ID NO: 17226 - DNA, 404 bp, Arabidopsis thaliana
  unsure at all n locations
  Clone ID: LIB35-038-Q1-E1-H5
gtttctgtgaactcaaaaaaaaaatcaaatcctttttgagtttcaatctctgagagtttctatgaaacaatcgtcatggggttgcacaatcttcatccaattatctctatgtctcatcatctatgtgtctctgcattcgggtcacccattcttcttctctagtgacgacggtgacaatgccacacctctagatcttcatttcatctccgttgccggcggtttcaggcctcttaaccaccaaactcgccttctccgattgatggagaaagttgcagaaacttacaaggccaaatttgttgtgagctcaagtgaacaaggagaagaagatccattcctgcaaaatgcgactcgactgtcttcttcactgaaacttccatggtacactagaatgaanggatctggat

SEQ ID NO: 17227 - DNA, 501 bp, Arabidopsis thaliana
  unsure at all n locations
  Clone ID: LIB35-039-Q1-E1-A1
ctgtttacgcctgcccgtacnggtccgaaaatcccgnggtcnacccacgcgtccgcncacgcgtccgtanggctgcgaagaagacgacagaanggaacaactcaggaaatcatcaaggaactgcctactgcattgaaaatcgttgatctttcagcggacttccggttgcgtgatattgcagaatatgaagaatggtatggtcagcctcacaaggcagtatagttacagaaagaagttgtgtatggtctaacanngatactaanggaggacatannaaaaggcacgacttgtggctaacccaggctgttacncgactacgattcaacttcctcttgtncctttactaaaggcanatctcatcanacatgaaaacatcattatcgatgcaaaatctggtgttantggaccaggacgtggtgctaaagangcaagtctttactctgagataacctgaangcanttcttcttaaggtgtcacccgtcatcgccatgttcccgaaa

SEQ ID NO: 17228 - DNA, 392 bp, Arabidopsis thaliana
  unsure at all n locations
  Clone ID: LIB35-039-Q1-E1-A10
agacactgtgacactctagcaccttcagttccgtacaacaatggctctccaagctgcctattctcttcttccttctaccatttcaatccaaaaagagggcaaattcaatgcttctctaaaggagacgacttttactggttcttcattttcagaccatcttagagctgaaaagatatccaccctgttgaccatcaaggaacagagaagacagaaaccgcgattttccaccggtattcgtgcacagacagttacagcaagcccgccggcaaacgaagcatcgccggagcaaaagaaactgaaagaaaaggactgcattgattactgggagctccgncgggttaaggttaagctacnggcaaagcctttagcagacacagggaaaatggatgtna

SEQ ID NO: 17229 - DNA, 89 bp, Arabidopsis thaliana
  Clone ID: LIB35-039-Q1-E1-A11
acacactccttttattaatcataaagttcataaaattaaacaagaagacttttcattaaaagtctcctatatttttggtaagatactga

SEQ ID NO: 17230 - DNA, 459 bp, Arabidopsis thaliana
  unsure at all n locations
  Clone ID: LIB35-039-Q1-E1-A12
agnctctataactgatgtcgnaataacgacagaaggggagatcaattctcagctgacattgaggtttatctcagatcgaaatcgagaagaagatgtttctcactaggactgagtatgacagaggagtcaatacattttctcctgaaggtcgtctctttcaggttgagtatgccattgaagctatcaagcttggttctactgctattggtgtaaagacgaaaganggagttgttcttgcagtcgagaaagcgtattacttcgcctttactgggagccgagtantgttganaaagattatgggaaattgatgancatataaggntgtgccaagaattggcctgaantggctgaacgccccgaaaaacttgttgagcaagcaccaatntagnaccaaaaacacaanggttcncntaagggtgaacccatgactggtntnaaaccacaacaaaaaccnttttt

SEQ ID NO: 17231 - DNA, 385 bp, Arabidopsis thaliana
  unsure at all n locations
  Clone ID: LIB35-039-Q1-E1-A2
agatcagtttgggagaaagcagcatngaagaanaatggcagcaacatttgcaacaccatcgacggtgatangcctcggaggatcatccatcaccaccanacccttctcttcancctttttaaaaccancattaagcgccaagaaccctttgagactcgccggtgcatcgggaggaagagtcacttgctttgatangaantggttgaggagagatttgaacgtggtacagatttgggctgatcggatggctagctccgtcgagcattccancgataactgggaaagagcctgacgggtctcntcttcgatagcntcggaantgagctcgctcacttcncgactcctccaactctcacttcacacttctggctgtgggtggttacnt

SEQ ID NO: 17232 - DNA, 369 bp, Arabidopsis thaliana
  unsure at all n locations
  Clone ID: LIB35-037-Q1-E1-F9
cctctctctcttctttctctcaaaattttcagagagagaatcaaaccaaaattttcgacgacggtaaattgatgtcgtcggtgatggttgaattgccgtccggtgtagtatccggctttcgtctgacatatattggcttccacagcagtacatgtcggcccttgtctagcatcatcggctctttcagcggtgatggctagctcacggtgttaatccggcgtagttcggttttcttttccttttggtttatatcacggttacgtttcgaccgttgattgtctttagatnagaattcattgggtatgtgtgttggtgaaggcgttggttttcaatccaagcntgcttaataaatttaatccaacctaacct

SEQ ID NO: 17233 - DNA, 409 bp, Arabidopsis thaliana
  unsure at all n locations
  Clone ID: LIB35-037-Q1-E1-G3
tctcactttgttcatctaaaaactcctcctttcatttccaaacaaaaacttcttttattctcacatcttaaagatctctctcatggcgatgtctttctcaggagctgttctcactggtatggcttcttctttccacaacggagccaagcagagcagcttcggcgctgtcagagtcggccagaaaactcagttcgtcgtcgtttctcaacgcaagaagtcgttgatctacgccgctaaaggtgacggcaacatcctcgatgacctcaacgaggccacaaagaaagcttcagatttcgtgacggataaaacaaaagangcattagcagatggtgagaaagcgaaagactacgttgttgaaaaaaacagtgaaaccgcagatacattgggtaaagaagctgagaaagctgcg

SEQ ID NO: 17234 - DNA, 387 bp, Arabidopsis thaliana
  unsure at all n locations
  Clone ID: LIB35-037-Q1-E1-H1
cgacanaagggtacggctgcganaanacgacagaagggtacggctgcgagaagacgacagaagggtacggctgcgagaanacgacagaagggtacggctgcgagaagacgacagaagggtacngctgcnagaagacgacagaagggtacggctgcgagaanacgacagaanggtacggctgcgagaagaccacagaagggtacngctgcnataagacgacagaatggtacggctgcganaagacgacagaagggtacngctgcganaatacgacagaagggtacggctgccagaagacgacagaatggtacggctgcnacaagacnacagaacggtacggctgcnagaaanacnacacaangtactgctgccgaaaacacataaggg

SEQ ID NO: 17235 - DNA, 431 bp, Arabidopsis thaliana
  unsure at all n locations
  Clone ID: LIB35-037-Q1-E1-F8
gcgtccganacgacagaagggggcagacgcagccatgggtatcgatcttatcgcaggaggtaagagtaagaagaccaaaaggactgctcctaagtccgatgatgtctacctaaagcttctcgtcaagctttaccggtttttggtgaggagatctaacagcaacttcaatgctgtgattctgaaaaggcttttcatgagcaaagtcaacaaagctcctctttcactctctaggcttgtaaagttcatgactggcaaggatgacaagattgctgtgttggttggaactatcactgatgatttgagagttcatgagattcctgccatgaangttactgccttgaggtttactganaaggctagggctagaattgagaaagctggtggagagtgcttaacctttgaccaacttgctctcagagctccattgggac

SEQ ID NO: 17236 - DNA, 419 bp, Arabidopsis thaliana
  unsure at all n locations
  Clone ID: LIB35-037-Q1-E1-H12
cagaagggggaagacacacatacacacactaccgataaagaaaaaccagagaagagagagagataacaacaatggtttcctcgcttcttatgtcatttgctccggccaccgtgagggtttacgccacaagcacaaagggaggttcaggcggcccaaaggaggagaagaatcccatcgactttgttcttgggtttatgacaaaacaagatcagttctatgagactaatccacttctaaagaangtggatgagaaagaaggcaccaccaccggaggccgangaaccgttcgcggtggtaaaaactcagctccgacncctgtgccgaagaataagcgagggtggatttggtggcctantgaancctcctcaagganatnttagnaanaaantggtntanttattttgcattaatcaagccnc

SEQ ID NO: 17237 - DNA, 429 bp, Arabidopsis thaliana
  unsure at all n locations
  Clone ID: LIB35-037-Q1-E1-H6
gcgtccgtacggctgcgagaagacgacagaagggggacacagaaacaatccaaaggtgagatctcttatagtttcgagattcgaggaagacttttggatacgatcagcttcagtcttccacaacttaacattgctcagggtgttggatctttctagggtaaagtttggaggagggaagttaccttctagcattggagggctcatccacttgagatacttgagcttatacggagctgtggtatctcatctaccttctactatgcggaacttaaagcttctgctctttttgaacttacgtgttgataacaaggaaccgattcacgtgccaaatgttttgaaagagatgctagagttgangtacctttccctacctcaggaaatgggatgataaaaccaagttggaattgggtgatcantgaacctggagta

SEQ ID NO: 17238 - DNA, 409 bp, Arabidopsis thaliana
  unsure at all n locations
  Clone ID: LIB35-037-Q1-E1-H9
cgaanaagaagatgatgaagctcaaagtgtatgcagatcgnntgtcacagccatcacgtgctgttatngtattctgcaangttaatggaatccagttcgatgaggtcttgatttccttggcgaagcgtcaacaattatctcctganttcaangatattaacccattggggaangttccagctattgttgatggcaggcttaagctctttgagagtcacgcaatcccganatatctatcctcggcgtttccaantgttgctgatcattggtatccaaatgatctatccaacanagccaanattcactcanttttggattggcatcacaccacattacgtcntggtngcaactggatacgttctgaataatgtactaagtccanctctcggtcttcctccgaaaccgaaag

SEQ ID NO: 17239 - DNA, 108 bp, Arabidopsis thaliana
  unsure at all n locations
  Clone ID: LIB35-038-Q1-E1-A1
ggctgcnagaagacnacagaanggtacggctgcnanaagacnacagaanggtacggctgcnagaagacnacagaanggtacgctgccagaagacacanaaggggactc

SEQ ID NO: 17240 - DNA, 259 bp, Arabidopsis thaliana
  unsure at all n locations
  Clone ID: LIB35-038-Q1-E1-A11
cgtcgtttcttatatcgttgccagagagagtttgacggcggagagatatggcggcgttgatggagtcagtcgtcggccgagctctaaaattctcatcgacggcgaatttcaggtcaatccgacgcggcgaaacaccaacactctgtatcaaatcattctccaccattatgtcaccaccgtcaaaagccatcgtctacgaagaacacggctctcccgattccgtcaccanattggtgaatctcccgccggtggaagtnaa

SEQ ID NO: 17241 - DNA, 486 bp, Arabidopsis thaliana
  unsure at all n locations
  Clone ID: LIB35-038-Q1-E1-A5
ctgcccggnaccgaaccaanantcncnggtcnacccacgcntccgcncanacntcngcccacgcgtccgcccacgcgtccgcccacgcgtccgtacggctgcgagaagacgacaaaagggtaaggctgcgagaagacgacagaagggtacggctgcgagaagacgacagaagggtacggctgcgagaagacgacagaagggtacggctgcgagaagacgacagaagggtacggctgcganaagacgacagaaggggataaagaanaagaagctaacgaaaaataatggcggagagatcaaattcagaggaagtgaagcttttgggaatgtgggcgagtccttttagtcggaggattgagattgctcttacgcttaaaggtgtttcgtatgagttcctggagcaagatatcacaaacaagaactctttgttgcttcaattgaatccggttcataanatgattccggttcttgttcataatgggtaaa

SEQ ID NO: 17242 - DNA, 403 bp, Arabidopsis thaliana
  unsure at all n locations
  Clone ID: LIB35-038-Q1-E1-A8
acgaaaccgagagaaacaatgggagacgctgcgatccgtaccgtcgtcgaagccattcactcatctccgacgcaggccgtcgtctatctttgcggcggtgcctctctggctttaggttggttgatgtcggttcctggagcgtcgaacacgcttctcgagtccgtggttccttattcgagagtatctatggttcaattactcggcagggttccgagccaacactgtagccaagcattggccaaggagatggccttgttagcctacaatcgggcgcttaagctctctaaaccaggatatccggttctcggtgtcgggtttacgggatcattggtaacttctcgtcctaagcgtggagatnacaggttctttttgtctatgagagcatccgacccggattttggaa

SEQ ID NO: 17243 - DNA, 381 bp, Arabidopsis thaliana
  unsure at all n locations
  Clone ID: LIB35-038-Q1-E1-B11
ctccgttggagtcacctgctctgcttcatcttctctgacgactcttccctctgctcttctcttcgattgcgatggcgttcttgttgataccgagaaggacggtcacaggatctccttcaacgacactttcaaagagagagatttgaatgttacgtgggatgttgatttatacggcgagttacttaaaatcggtggtggtaaagaaaggatgactgcgtattttaacaaggttggttggccagagaaagctcctaaagatgaagcagagaggaaagagttcatagctggacttcacaagcagaagactgagcttttcatggttcttatcgagaaaaagctgcttccgcttcgacccggtgttgcaaagttggttgatnaagc

SEQ ID NO: 17244 - DNA, 424 bp, Arabidopsis thaliana
  unsure at all n locations
  Clone ID: LIB35-038-Q1-E1-B6
gtantaacgacagaagggggaggtcaaggatgaggaaacagaagcaacttggtgatttgatcaacgaagtcactcttctcaagaatgataacgctaaaatcactgagcaggttgatgaagcttcaaagaaatacattgaaatggagtctaagaacaatgtcttgagggcacaggcttcggagttggcggataggttgagatcattgaactctgtgcttgagatggttgaagaaattagtggtcaggctttggatattcctgagattcctgaatctatgcagaacccttggcagatgccttgtccaatgcaaccaatcagagcttctgctgatatgtttgattgctgaagatggatgattcatatctgaaggatcaaaaatgaagcattgagttcgagtctttggtctgttttacttactgtcct

SEQ ID NO: 17245 - DNA, 444 bp, Arabidopsis thaliana
  unsure at all n locations
  Clone ID: LIB35-038-Q1-E1-B8
caancctctatactgattcgnaataacgacagaagggggaaggtcgtgagaaaagaaaaacacttctcaatctttctacagtcttcttcttccaaaagaacaccatcttccttcgtaatgtcagagaaccagtccgaagaagtccagcaaatcgagaagctctatgagttcagtgagcgtctcaatgcctccaaggacaagtctcagaatgttgaggattatgaggggatcattaagatgtccaagactagtangaaggcaaagcagcttgcgtcgcagctaattcctcgctacttcaagttcttccctagtctctctactgaggctttcgatgcgcatatggactgtatcgatgatggagatcttggggtacgtgttcaagccatccgtgggctcncgctgttttgtaaggatacgccagatattttatctaagattgttgat

SEQ ID NO: 17246 - DNA, 384 bp, Arabidopsis thaliana
  unsure at all n locations
  Clone ID: LIB35-038-Q1-E1-C11
atcgaaaaaacccctaactttgacatggaaggagagattcaagactgggaaatacttcagagctcgagatctaccacggaagatgacaattcgaggagcttggaggagattgatgatggcacgcaaggtatgattaggtttgatcatttctctcttgagaaccagagtggtttgtctcgtttggangcaaacgatgaanatgggtctgttcaatcgggtagtccaggatggatcgaacctagctccgatgttccttatggtccgaagcattttantgagttatggtctgattcangcagtgatcggcttgatgatcaagaggttagtggatgatgatgtgaataacnanatgggtataganagaaacgaagtgggtantgttga

SEQ ID NO: 17247 - DNA, 233 bp, Arabidopsis thaliana
  unsure at all n locations
  Clone ID: LIB35-038-Q1-E1-C12
gaaaaagagatggaaagaaaaaagttttcttcaaaatttattcatttgctcattgtgtttttgcttctttgtacgtttctttctcgtaccgaatctgctcttccttatcaccatgaactgttcttggggaggaagcggatgaattattataagcccaacagtgccataggaacancatcatcanctagtgaccacgctccangcagtaatgggaggaagttgatgagtgtana

SEQ ID NO: 17248 - DNA, 419 bp, Arabidopsis thaliana
  unsure at all n locations
  Clone ID: LIB35-038-Q1-E1-C2
catantacgacagaaggggatcaaaggggtttttagggtttcgtcactcgccgataatcctctctctctagaaaacatgactgccgaacagaaagtggagctcgccgccaaattggaagagcagaagatcnnnnnnnnnnnnnnnnnnnnnnnnnnnnnnnnnnnnnnnnnnnnnnnnnnnnnnnnnnnnnnnnnnnnnnnnnnnnnnnnnnnnnnnnnnnccggtggccggtcaaagcaaagcagaagtgagaaaaagagtcgtaaagctatgttgaagcttgggatgaaaccaatcactggtgttagccgtgtcaccgtcaaaaagagcaagaatatcttgtttgtgatatcaaaacctgatgtgttcaagagtccagcttcagatacatatgtgatctttggtgaggccangatag

SEQ ID NO: 17249 - DNA, 81 bp, Arabidopsis thaliana
  unsure at all n locations
  Clone ID: LIB35-038-Q1-E1-C3
actgattcgnaatacgacagaagggatctgtttgttgggaagcgttagttgttgttagtttcgatgggacttcatcgacca

SEQ ID NO: 17250 - DNA, 179 bp, Arabidopsis thaliana
  unsure at all n locations
  Clone ID: LIB35-037-Q1-E1-A5
gaagggtacggctgcgagaagacgacagaagggtacggctgcgagaagacgacagaagggtacggctgcgagaagacgacagaagggtacggctgcgagaagacgacagaagggcacggctgcgagaagacgacagaagggccnnnnnnnnnnnnnnnnnnnnnnnnnnnnnngcggcc

SEQ ID NO: 17251 - DNA, 346 bp, Arabidopsis thaliana
  unsure at all n locations
  Clone ID: LIB35-037-Q1-E1-A7
ggctgcgagaagacgacagaagggtacggctgcganaagacgacagaagggtacggctgcgagaagacgacagaagggtacggctgcgagaagacgacagaagggtacggctgcgagaagacgacagaagggtacggctgcganaagacgacagaagggtacggctgcgagaagacgacagaagggtacggctgcgagaagactacagaanggtacggctgcganaagacgacagaagggtacngctgcnanaagacgacagaagggtacggctgcgagaatacgacanaagggtacngctgcganaanacgacagaacggtacggctgcnanaagacgacagaac

SEQ ID NO: 17252 - DNA, 415 bp, Arabidopsis thaliana
  Clone ID: LIB35-037-Q1-E1-A8
ggaactcagaatggtactctcttgttgtattcatggggatttttcaaggattgcagcgatcggtttgttgatctcgctccaaattccgttgatgctctactgaagctcgatgaggacagacttatcactggatgtgataatggaataattagccttgttggaatactgcccaacagaatcatacagccgattgggtcacacgactaccctatcgaagatctcgctctttcgcatgataagaaatttctcggtagcacagctcatgacagtatgctgaagttgtggaacctagaagagattctagaaggttctaatgtcaactctgggaatgcatctggagctgcagaagacagtgacagcgacaatgatgggatggaccttgacaatgatccttccaagtcttccaaaggcagca

SEQ ID NO: 17253 - DNA, 409 bp, Arabidopsis thaliana
  unsure at all n locations
  Clone ID: LIB35-037-Q1-E1-A11
agacatttcttccctctggatctccaaaagtaagaacatttacaagaaacgagaggtttgggtggggaaggaaagaaggaggaagaggcaatgtcagctaggtattggtgtcacatgtgttcacaaatggtgaatccagttattggtgccgagatcaaatgccccttttgccaaagcgggtttgtcgaggaaatgagccgtgagattaatggcggcagcagtagcagtctaagggaggttcaagaccctgagattgattttggtacagaccgtgcattgtctctatggggtccaatcttgcttggaatgatgagtaatcccgtnnnnnnnnnnnnnnnnnnnnnnnnnnnnnnnnnnnnnnnnnnnnnnnnnnnnnnnnnnnnnnnnnnnnnnnnnnnnnnnnnnnnng

SEQ ID NO: 17254 - DNA, 411 bp, Arabidopsis thaliana
  unsure at all n locations
  Clone ID: LIB35-037-Q1-E1-B11
cgtaggttgatatttaacaaggaatggcaaaggaagggggcttgggagagaactcaagatggagtcttggaggcatgaccgctcttgtcactggtggctctaaaggcatcggggaggctgtggtggaggaactagccatgttgggagcaaaagtccacacgtgtgccagagacgaaactcagcttcaagaacgcttacgtgaatggcaagcaaaagggtttcaggtcaccacttctgtctgcgacgtctcttctcgtgaccaacgagtgaaactcatggaaactgtttcctctctctaccaaggaaaactcaacatcctcgtcaacaatgtgggaacgtcaatattcaaagccgancacagagtatacagcagaaaaattcncctttgtaatggctacaaatcnccaattc

SEQ ID NO: 17255 - DNA, 479 bp, Arabidopsis thaliana
  unsure at all n locations
  Clone ID: LIB35-037-Q1-E1-B2
tgttagcttccggtgccgtccgnaattcaagggtcgacccacgcgtccgcccacgcgtccgtacggctgcgagaaacgacagaanggggagaacaactaagttaaagggaaagcaaaaatgggctgcatcggtgttgtgaatgtaacaagcataaatccatatctcacaagaagatcaaacaaaccctacaattcaagaagaccatcatccatggctgctgcgattagagctgagtctactgagaaattagggattacaattgaaaagaatcctcctgagtccaaactaacccaactcggtgttcgtagttggcccaagtggggttgtcctccaagcaagtttccatggacttacagtgcaaaggagacttgttatttactacaaggaaagtgaaagtgtaccctaatggatccgatgaaggcgtagagatcgaagcaggcgactttgttgttttccctaaaggaatgagttgcacttg

SEQ ID NO: 17256 - DNA, 418 bp, Arabidopsis thaliana
  unsure at all n locations
  Clone ID: LIB35-037-Q1-E1-C10
gacagagagatcttaacacaaaacaaagcaaacaccaaaaaaaacagagatgggtttggttacagatgaagtgagagctagggcagagaaatacacaggagatgagatatgccgtgagaagacaaaggagtttctcaaggaagtttctatgcctaatggtttattgccattgaaggacattgaagaagttggttacgacagagagacaggtattgtctggctgaagcagaagaagagcatcacccacaagtttgaagccattggtaaacttgtctcttacgccaccgangtcattgcacaagtggaagtcngaaagatnaagaagcttaccggtgttaangccaaaggagcctcctaatttgggtcactctcaatgaacttgtccttggaancaaccgacaaagttcaagggaaaatt

SEQ ID NO: 17257 - DNA, 487 bp, Arabidopsis thaliana
  unsure at all n locations
  Clone ID: LIB35-037-Q1-E1-C2
ctgtttacgcttcccgtagccgtccnaaaattcangggtcgacccacgcgtccganacgacaanaagggtacggctgcaagangacgacanaaaggatacggctgcgagaagacgacanaaagggcggggagagcgagggttgttgctcaatgggctgatcctgaatccaaaatcaaagaagccatcnaagcttgccctgtatactgcatttcaatggtgganagatctgaccttgctccattggagttccntatgtcaaagcaaccacgaggcaacgtgaggatcggggttggaaacacggttggtgagcgtgtctccaatgtatttgttgatgtcaagaagttccaagaaagatacgctaaagctatgagcagaaccacannagagacctcccagagagaagtacanataagtgcagtagaagcgattacgtccatttccaattggctatactggagatcatcaccgtacacgaaaccattgagt

SEQ ID NO: 17258 - DNA, 481 bp, Arabidopsis thaliana
  unsure at all n locations
  Clone ID: LIB35-037-Q1-E1-D4
ctgtttacgcttccngtagccctccgaaattccaaaggtcnacccacccgtccgtacggctgcgagaagacgacagaagggggaagaagagaanaagaagaaccttacaattgcttttgtaaatattgtaggtagtttaaggacgtcactacctacatacatggatttatgtggaactcagatgctgcgcctctcatcgcctcatttcaaaacccttcatttggtgaggcatgcacaaggagtccacaatatagcattagaagagaagggagagaaacctgaatcagaaaggctttttgacgcccacctttctccaaagggtttgcaacaggtttcggaaaggcgcaaccaaatccttgaatcaggattacttaacactgtcgagttagtgataacctctccgctgtgcagagcaatggaaacttcaataggaatatttaggggacaaggatatgtcaatatatccgaagactttgcaana

SEQ ID NO: 17259 - DNA, 467 bp, Arabidopsis thaliana
  unsure at all n locations
  Clone ID: LIB35-037-Q1-E1-E1
ngtagccgtccgaaaattcaaggggctgcgagaagacgacagaagggtacggctgcgagaagacgacagaagggtacggctgcgagaagacgacagaagggtacggctgcgtgaagacgacagaagggctagttttgctgtcccaatatataatcgggttttatgtccagcatctccgacttccggagttgtgatggctggccctctgtttggcatcatccggcttctataaggagcgttggccagcttcgtcgttttttctagtcgtccggtgtatgaggttcgtatcacgtttaatattcgctgtttggttattataaatccagtagatccggttatgtctctacttttgttcaattatttcgaggattaatagttctgctccggtggcctctaacaaggttatgtgttgatagctttgttggatctacatgtttctttcgatttanttgtcaaaacagttctgc

SEQ ID NO: 17260 - DNA, 487 bp, Arabidopsis thaliana
  unsure at all n locations
  Clone ID: LIB35-037-Q1-E1-E3
actgttacgcnttccggtagcccgncagannttcnagggtcnacncacgcgtcngtacngctgcgagtaagacgacagaagggggaagcagaagtaacggcaaccaaaaatgacgacaatggcgacacaaggcgcttggctacgaatgacctcatcagccaagtccatgaccaagtcaaccgtgacttcaaaggagcttggattcctcacctcccagctcagcggcttaagaatctcatatactcccagtgacgtcatcaaccgtatctcccttccttcgttccccgggattcagccantcgtcgcacgtagaatctgcccttttactgggaagaaagcaaacagagcaaacaaagtttcattctctaaccacaagaccaagaagttgcaattcgtcaacttacaatacangagagtttggtgggaagctggcaaaacgttttgtcaaacttcgtttatcaactaaaggctttgaagaccatttgag

SEQ ID NO: 17261 - DNA, 404 bp, Arabidopsis thaliana
  unsure at all n locations
  Clone ID: LIB35-037-Q1-E1-E5
tacggctgcgagaagacgacagaaggatacggctgcgnnnnnnnnnnnnnnnnnnnnnnnnnnnnnnnnnnnnnnnnnnnnnnnnnnnnnnnnnnnnnnnnnnnnnnnnnnnnnnnnnnnnnnnnnnnnnnnnnnnnnnnnnngtgctggaagtagccgacgtagcatggaccgcggtggaaacttnnnnnnnnnnnnnnnnnnnnnnnnnnnnnnnnnnnnngtcaacgaatccaatttctgatccacgagatcgtgaattagaagctcttcgtcaagagaatcgtcgtctcaggactttgcttgaatcgaatcttaaactctttgagactctcgctgaatctgctgcgttctctcatgattgccctagcgacctctatgctaggcttgtaacgatggttact

SEQ ID NO: 17262 - DNA, 128 bp, Arabidopsis thaliana
  Clone ID: LIB35-037-Q1-E1-E9
attcccagatgatttaccttgggaacagaggaatattgtctctcatcatgtatttggtttggattgtttgttcatttgtcattacaatctattgactttataagacaatttgaatggtcatttggcta

SEQ ID NO: 17263 - DNA, 413 bp, Arabidopsis thaliana
  Clone ID: LIB35-037-Q1-E1-F11
ggaaagcttacacaatcaccaagtctagagagagttggactgaaggagaacacgacaagtttctggaagctcttcaattgtttgatcgtgactggaaaaagatagaagattttgttggttcaaagacagttattcagatcaggagccatgcccaaaaatactttctaaaggtccaaaaaaatgggactttagcacatgttccaccccctaggcctaagcgcaaagctgcttatccatatcctcaaaaggcatcgaaaaatgctcaaatgtcgcttcacgtttccatgtcctttcctactcaaataaataacctgcctggatatactccatgggatgatgatacatctgcattgttaaaacattgctgtaagtggggttattccaccaagaagatgaacttgatactccttgtg

SEQ ID NO: 17264 - DNA, 458 bp, Arabidopsis thaliana
  unsure at all n locations
  Clone ID: LIB35-037-Q1-E1-F2
ctgttaccttccgtncccgtccnaaatcaagggtcgacccacgcgtccgggacgacagnaagggttntggttaagggtnaaatgccactcgaacccagagctagctggttctccccgaaatgcgttgatgcgcagcagttgactggacatctangggtaaagcactgtttcggtgcnggccgcgagagcggtaccaaatcgaggcaaactctgaatactagatatgacctcaaaataactggggtcaangtcggccagtgagacggtgggggataagcttcatcgtcgagagggaaacagcccggatnaccagctaaggcccctaaatgaccgctcagtgataaatgangtaagggtgcagagacagccaggaagtttgcctagaaagcagccacccttganagantgcgtaatagctcactgatcgggcgctcttgcgcccaanatgaacggggcta

SEQ ID NO: 17265 - DNA, 392 bp, Arabidopsis thaliana
  unsure at all n locations
  Clone ID: LIB35-037-Q1-E1-F6
gtcttcagttccaatggcgtcgtgtattgctactgctcctctttctctatctggcgtgtctcaatctcattatgtgaaagctaatggattgtctacaacaacaaaactcagttctatttgtaaaacctctgatttgactattcacaagaaatcaaaccggactcgcaagttttctgtttctgcagggtatcgagatggaagtagaagcggaagcagtggtgatttcattgctggttttcttctaggaggtgctgtctttggcgctgttgcttatanctttgctccacagatccgaanatcggttctaaatgaanaagacgantacaattttgagaanccgaaacaccaacgtactacnatgaaggtttanaggaaancaaggagagacactg

SEQ ID NO: 17266 - DNA, 542 bp, Arabidopsis thaliana
  unsure at all n locations
  Clone ID: LIB35-034-Q1-E1-H10
actggttttnctttgcctaggcctaccggnaaggaaatcccgggtcgacccacgcgtccgcccangcgtccgcccacgcgtccgtacggctgcgaaagacgacagaagggggatccttccaaagaatctccaaaatccctaaacttcgaaaatggcagaaaccgccgagacaatcaacaccacgatctcatcgccgccaccggaatccgaaagctccaccactatttctgcaatgacagatccaacatctcaagaagcagcctcaaaagacacagatctgacgaaagaagccgantcagagaagaaaccaggaggaatctctctccgaatctggccaccgactcagaaaactcgcgacgccgttctgaatcgcctgatcgagaccttatccaccgaatcaatcctctctaaagagatacggtactccttaaatctgacgatgcaaacaacgttcgccgaaaactttatcgaaagaaagaaggcttaaggtggtttcccttcgaaatgctgttgttcaagttgattgangaatgggaattaaa

SEQ ID NO: 17267 - DNA, 516 bp, Arabidopsis thaliana
  unsure at all n locations
  Clone ID: LIB35-034-Q1-E1-H2
ntggccctacaattccgaaatcgacccacgcctccgcccacgcgtcnntacggctgcgagaagacgacagaagggtacgctgcgagaagacgacanaaggatacggctgcgagaagacgacagaanggtacggctgcgagaagacgacagaanggggaaaacgaaagttccgaagaanaagaanaagaaggagaaaagatgatttaccgaaagtggagtttgctgtccggcccaccggttatcctcggcggagcggtaattgctgccgtcnccgtcggattcgtcttgcaaaacgtaacgaaagggggagcagaanaagaatgtctcaacaaacaaggtgagaagacaaatggagagatgctacanaatgtggtgatcatgtgatttgatacaatttagntcatgcagtgttataagctcaataatgcctttngtaancttttgaatacacagctctttgtggggttttttangattccntgttaccaantaatgataattcnattttccaaaaaa

SEQ ID NO: 17268 - DNA, 515 bp, Arabidopsis thaliana
  unsure at all n locations
  Clone ID: LIB35-034-Q1-E1-H3
aactggtttgcctggccctacngctccggaaattcccaggtcgacccacgcgtccgcccacgcgtccgtcgctgcgagaagacgacagaagggtacggctgcgagaagacgacagaagggggtcctttcaacaattcaatggcagacccaagagttgcagttgttactggttccaacaaagggattgggtttgagatttgcaggcaactagctaacaatgggataactgtggttttaactgcgagagatgaaaacaagggtcttgctgctgtccaaaagctcaagactgagaatggtttttctgatcaagccatctcctttcaccctcttgatgtctccaacccagacaccatcgcttctcttgctgcttttgtcaagacccgcttcggcaaactcgatattctggttaataatgccggagttggaggggcgaatgttaatgttgatgttctcaaaagctcaaattgctgaggctggtgcgccaactgatattccaagataatgaagtgatacat

SEQ ID NO: 17269 - DNA, 433 bp, Arabidopsis thaliana
  unsure at all n locations
  Clone ID: LIB35-034-Q1-E1-H5
agaagggggaagatggcagtgagacaaaaagcaatggcgacgttgccgaaactgattcaaagcatgagaaacgaagttacgaagcagcccagtcttgtcntaccatctctcagaagagctttctctctctacgatcagatcaatctcatcgataacgttcctgaggatcagctccgatttcaggagtattcatctctctcagtcatgttcctaatttgactaagtancaagggaatttggattttcgggtatgaaatgaatcaattaatgggtgctttttgcaggtttgatganacnantttcacngtgaatggggttaaattcgaaaggaagcntgcnccgtgttggggaatttgctaatgtnatggaancctcgttacttctccgacatcacnacggntaggnccnagtaccancttctccttctctcagc

SEQ ID NO: 17270 - DNA, 524 bp, Arabidopsis thaliana
  unsure at all n locations
  Clone ID: LIB35-034-Q1-E1-G6
gtttgccgtgnccttgggcccctacaantccggaattcccgggtcgacccacgcgtccgtacnagctgcgagaagacgcagaagggggagactcagaaaaaaattcaaaatccgtaaatctgatgatgcattccgtttcacggctcgcgaggaggttctgtgcaacgctcgctactgctacggcggagattagcggcgaggctgctgcttctgttccgacgaaggcgaaaaagcatcggtcaatatacaagaaactctcaagccttggcacgaggggaggagggaaaatggaggaaacgctaaatcagttcgtcatggaaggcgtacctgtcaaaaaacacgacctcattcgctacgcaaaggatcttcgcaagtttcgtcaacctcaacgcgctctcgaggtctttgagtggatggaaagaaaggaaatagcgtttactggcagcgatnacgcgattcgtttgaatctaattgcaanagagtaaangcttanaggcggctgagacctacttcaacagtttaga

SEQ ID NO: 17271 - DNA, 392 bp, Arabidopsis thaliana
  unsure at all n locations
  Clone ID: LIB35-035-Q1-E1-A1
tgtggcaaggctacacttgtgtttgcacttgattatcttttcaagacaacaaaaaagaagtcagcgacgatatccgtagacgatttttacttgactgcagaaggccaggctgaattgagaaaaaagaatccaggaaatgcacttctagagtatcgtggaaatgcaggaagtcatgatctgaaactttctgttgaaacactagaagccctgtcgaaactgaccaaagaaggcttaaagatgaangtacctaagtacaataaagtctgcctatagtggganangtgacaagggccgaatcatcaacatggnctgaagttnaaaggaacctctanccgggttaattcccctttgangggatgggatgncttgggnttttaaagcctcttccaagc

SEQ ID NO: 17272 - DNA, 408 bp, Arabidopsis thaliana
  unsure at all n locations
  Clone ID: LIB35-035-Q1-E1-C6
gctttgcaaactctacactgcttcgtcncttagctcganattgatctccntaaaatggcgtcagagaagaagctctcgaaccccatgatggacattaaggttcacaaacttgttctcaagcatttccgttggtganagtggtnatcgtctcactcgtgcctccaaggngttgggagcacctcagtggacaaacccctgtcttctctaaggcgaggtacactgtgaggtcttttggnatcaggcntaatgaaaanattgcgtgttatgtgactgtgagatgtgaganngcaatgcancntcttganagtggtttgnaanttaatgagtatgagcttcttangaggagcttcagtgacactggttgcnttggatttggtatccaanaacacattgatcttgggatcaaat

SEQ ID NO: 17273 - DNA, 495 bp, Arabidopsis thaliana
  unsure at all n locations
  Clone ID: LIB35-035-Q1-E1-E4
tttagtnagcccggcccgggccgaaactacccgggtccntccacgcatccgtaacggatgncnannaacancagaaggggttggntcaaccatgatgaatgcgaagacccatacttgcgtttagtatatgcttcgtcatgggctatatctgtttactatgccttccaacnaacttggaagcctttcaatcctattcttggggagacatatgagatggtcaaccatggtgggatttcttttatttctgagcaggttagccatcatccaccaatgagtgctggtcatgccgagaacgagcacttcatttacgacatcacatcaaagttgaaaactaaacttttgggtaactctgttgatgtttaccctgtgggaagaacgcgtgtaaccctcangaaagatggtgtggttctggatttggtgccgcctctcactaagattcacaatctaatatttggacgaacctgggttgaccacctggggaaatgggcatgacaa

SEQ ID NO: 17274 - DNA, 400 bp, Arabidopsis thaliana
  unsure at all n locations
  Clone ID: LIB35-035-Q1-E1-F4
cactttggagatttttctaacgcagaatctgagaataagctaaccgattccgatttcgagttcgtcgccgggaggaatganccggttgaatgagcaaaangggcccaanttcgacggcgaanaatcacctccgcctgattttgatgaanatcgaagtgtgggtgaggtagacggaggagatcacacgccattcgctggangtaaagtcagaaagaaagcntctcgctatanagagcatcgtggtgactatcttcacgtttcttctcntcctggattgaagcnaattctggagaaacaaggtgatacatcgattctttttgctgataaagttttgaagttcaccggctcggggaanatgaaacggcgtatttttatcctcactgattttgcgatctancta

SEQ ID NO: 17275 - DNA, 386 bp, Arabidopsis thaliana
  unsure at all n locations
  Clone ID: LIB35-035-Q1-E1-F7
aaaaaaaaaannacacacaacagtttcaatggccgcctcaacaatggctctctcctcccctgctttcgccggaaaggctgtnaacctttcccctgcggcatcagaagtccttggaancggccgtgtgacaatgaggaagactgttgccaagccaaagggtccatcatgcagcccatggtacggatccgaccgantcaagtacttgggtccattctctggcgagtcacccacnctaccttaccggagagttccccggagactacggatgggacacagctggtctatccgctgaccccgagacattcnnaaggaaccgtgagctagaanttatccanagcaggtgggccatgntcnganccctanggtgcgtcttccccnaacctttg

SEQ ID NO: 17276 - DNA, 478 bp, Arabidopsis thaliana
  unsure at all n locations
  Clone ID: LIB35-035-Q1-E1-G2
cnggtccgaaactaacgggtccacgcangcctcnntngagaatncnacataaaggggggggtcgcagtgaccaggcccgggcgactgtttaccaaaaacacaggtctccgcaaagtcgtaagaccatgtatgggggctgacgcctgcccagtgccggaaggttaaggaagttggtgacctgatgacaggggagccggcgaccgaagccccggtgaacggcggccgtaacaataacggtcctaaggtagcgaaattccttgtcgggtaagttccgacccgcacgaaaggcgtaacgatctgggcactgtctcggagagaggctcggtgaaatagacatgtctgtgaagatgcggactacctgcacctggacagaaagaccctaaagactgtcccaagggaagcttttacctacttagatggccaaaagaagtttgtcgaaatcnaccataatgatttgtatccatatctactantcaac

SEQ ID NO: 17277 - DNA, 378 bp, Arabidopsis thaliana
  unsure at all n locations
  Clone ID: LIB35-035-Q1-E1-H1
agtaagagagacagagagagagatgagtagcttcacgattccatctccttcctccttctctctttccaattcatataatcaaacctctcctcattccttcactctccgcaattctcgttccaattttgagttccaccggttacgattagatgtggagtctcgaagaagaagcacttctttacggtccaattgctccaccaaaggtacagattcaggtgaaaatgagaacaaaagtgtgttagatgctttctttttggggaaagcattagctgaggttatcaatgagagaattgagtctactgttggagaaatgttgagtactaatgggaagtttcaagctgagcaacanggaacaattcaagagattcagggagaggt

SEQ ID NO: 17278 - DNA, 406 bp, Arabidopsis thaliana
  unsure at all n locations
  Clone ID: LIB35-035-Q1-E1-H2
attggattcgggggaacacttgggaatgagagaattttcattgatgaagactttgctaaaatcacagtccgtcatcatgcagttgataaaacttaccaatcaggctctcttttcccaaaccanggttatttaccaagtagaggctttggttctaagatattgaagcatgggggttaggtggaaacaaggctanggaaattcaacaaaaataccaagaaaagagaagagcttttcactaaccaacgtcnaaagatngacttgaaaacgtttacgaactgggaagattcacctgagaaaatgatgatggatatgatgggtaatcctaatgctcctagaaagggaagaagaagtaatgaatgaaaanacgagaactgggtttgatatatacacacntataccttggttg

SEQ ID NO: 17279 - DNA, 437 bp, Arabidopsis thaliana
  unsure at all n locations
  Clone ID: LIB35-036-Q1-E1-A1
gaagggtacggctgcgnnnnnnnnnnnnnnnnnnnnnnnnnnnnnnnnnnnnnnnnnnnnnnnnnnnnnnnnnnnnnnnnnnnnnnnnnnnnnnnnnnnnnnnnnnngcggccgctctanaggatccaagcttacgtacgcgtgcatgcgacgtcatagctcttctatagtgtcacctaaattcaattcactggccgtcgttttacaacgtcgtgactgggaaaaccctggcgttacccaacttaatcgccttgcagcacatccccctttcgccaagctggcgtaatagcgantaggccccgcacccgatcgcccttcccaaacantttgccagcctgaattggcnaaatggggaanccnccctgtagccggngcaattaagccccggcgggtgttgtggttaacncccaaacgtgaccgctaacacttgccancgc

SEQ ID NO: 17280 - DNA, 424 bp, Arabidopsis thaliana
  unsure at all n locations
  Clone ID: LIB35-036-Q1-E1-A3
caaaatcgtccattgaagtgaacagtcagcatcgttttgcttgcttgtgcgtttctctcgaactctctccatggctgttgcgctccaattcagccgattatgcgttcgaccggatactttcgtgcgggagaatcatctctctggatccggatctctccgccgccggaaagctttatcagtccggtgctcgtctggcgatgagaacgctccttcgccatcggtggtgatggactccgatttcgacgccaaggtgttccgtaagaacttgacgagaagcgacaattacaatcgtaaanggttcggtcataaggaggagacactcaaagctcaagaatccaagagtacancaantgatataattgggngacactgaaaacaaattggtatacctaatccttggggaaatgttaccggtgaaacnccc

SEQ ID NO: 17281 - DNA, 504 bp, Arabidopsis thaliana
  unsure at all n locations
  Clone ID: LIB35-034-Q1-E1-C2
tggtttgccttncctacggcctccggaaatcccnaggtcgacccacgcntccgcccacgcgtccgcccacgcgtccgtacggctgcgagaagacgacagaaggggaaaaataaaaaaaaaaacagagaaaaggagatatggaatcaatcggagtccttatgatgtgccccatgtcctcctacctcgagaacgagcttgagaagcgcttcaaccttcttcgcttctgaacttctccggagaaatccgtcctcctagaaactcatcggaactccatccgcgccgtcgttgggaatgctctgccggcgccgatgctcagctcatcagcgatctgcccaaccttgagattgtatccagcttcagcgtcgggctcgacaagatcgatttggggaaatgcaaagaaaaaaggggatncgcgtcaccaacaccccccgacgttctcaccgaaagacgtcnccagatttcgccatcgggcttatcctggntctccttcgacgggctnttgtg

SEQ ID NO: 17282 - DNA, 482 bp, Arabidopsis thaliana
  unsure at all n locations
  Clone ID: LIB35-034-Q1-E1-C3
gcntacgggccccggaaatcccanatcgacccacgcctccgcccacgcgtcagcccacgcgtccgtacggctgcgagaagacgacagaaggggaaaaataaaaaaaaaaacagagaaaaggagatatggaatcaatcggagtccttatgatgtgccccatgtcctcctacctcgagaacgagcttgagaagcgcttcaaccttcttcgcttctgaacttctccggagaaatccgtcctcctagaaactcatcggaactccatccgcgccgtcgttgggaatgcttctgccggcgccgatgctcagctcatcagcgatctgcccaaccttgagattgtatccagcttcagcgtcggggctcgacaagatcgatttgggggaaatgcaaagannangggattcgcgtcaccaacacncccgacgttctcaccgaaagacgtcncagatttcgccatncgggcttatcctggctctccttcnacg

SEQ ID NO: 17283 - DNA, 510 bp, Arabidopsis thaliana
  unsure at all n locations
  Clone ID: LIB35-034-Q1-E1-D1
actggttgcctgtcctacgnccccggaaatcccanatcgacccacgcctccgtacagctgcgaaaagacgacagaangggggggttgggtttcttctcccttcctacatcctctctcttctctttctctacactttcatctaatggccggcctgagatggaganagtggnggaacacgatggccttccccacccggcgtatctggaatcgtttcaccgttcgcgtcgggtttcnacacagcggacttttgaggttanaacatgacgtgagttcttgcgagtatgaagacatacacntaatgtggaatttgttacacangaatgnagatcttacacgcgtacaatccaacaacaacancnacaagaggaagaaancttgttggaaccttccttggttcgtatcnttgccaaagattctgattcgtnttatgatataanncanancattgttgtatttgaganagnctttactggtcccttgcaattntggtgttggtttnatgacaacttt

SEQ ID NO: 17284 - DNA, 509 bp, Arabidopsis thaliana
  unsure at all n locations
  Clone ID: LIB35-034-Q1-E1-C1
cctggggccnaggaattcccanatcgacccacgccctgcgcccacgcgtcagcccacgcgtccgtacggctgcgagaagacgacagaaggggaatcactcgaaaactcatcaaatcaanaatcaaacacagagaagagaaaatggccgcagaaggagaagttatcgcttgccacaccgttgaagattggaccgagaagctcaaagccgccaacgaatccaagaaactgattgtganagacttcactgcaacatggtgcccaccttgccgtttcattgcacccgtctttgctgacttanccaaagaagcacctcgacgtagtcttcntcaaggtcgatgttngacganttgaacaacnggttgctgaggagtttaaaagttcaagcaactgccaacgtttatcttcatgaaagnaangananntcaagggagaccgtnggnttggtgctgcctaaagaagaaatcattgcaatctcgaagaaancacaacacagttgttnctgccgcttg

SEQ ID NO: 17285 - DNA, 437 bp, Arabidopsis thaliana
  unsure at all n locations
  Clone ID: LIB35-034-Q1-E1-D10
ggctgcgagaagacgacagaagggggagaaagaaagcgaaacttcgctggcgactaaagattgctgagaagacacgtcgtctctgtgagaactttttctttttcttctggtatattctggagacagatattgttttttcntctgattagaagaataatatgacggaagtgattancaaaacgagtttgttcntaagagcttgtggtaatcatcaccgtgttgatgatttccccttccccccggtnagttttggtgggtttggttttaaaaaaaatttcccctgtctgaaaccttaaaatcaagaacccccttaaaaantgtaattttacgggaaaacaagatngttttccggagaatcncaaagacgaaaagcttcaaaaagatnatccagctatcacaagctcanacaactttgagggattgggacaanctcaaaa

SEQ ID NO: 17286 - DNA, 441 bp, Arabidopsis thaliana
  unsure at all n locations
  Clone ID: LIB35-034-Q1-E1-D3
cgacagaaggggacaggcggagaaatcaaaanaccaaaaatccaatctttggattcttacttctacgatttgtgtgtttcctcaaacccaantgtctcgtctcccgattttaatcgcttcgtgtctcttcctctcttcactcaccgccgccgtcgtcaccgccgccgaatccgatactccgacggcttattcactcctccaaagctacaacttccccgtcggaatccttccaaaaggagtcgtagcttatgatttagacncancaacaggcaanattccatgcctntttcnacgattcatgtngcttcaatctttgttggttccttancanttgaatntacaaatcaacnctcaagtggtttacatctccggagaancnaagctcangaaatttgcnnggttgtttaaaagtccaaagttttgttcnttggtggcctaaac

SEQ ID NO: 17287 - DNA, 471 bp, Arabidopsis thaliana
  unsure at all n locations
  Clone ID: LIB35-034-Q1-E1-D5
gcgtccgtacagctgcgagaagacgacagaaggggggacttgctgctacaggtgcaaccgtgcgcctccgggtacgtacggaaactacgacaagtgccagtgctacgctagcctcaccacccacggtggacgccgcaagtgcccanaagaagaaacanagctcttaattgctgcagataatgggacgatgtcgttttgttagtatttactttggcgtatatatgtggatcgaataataaacgagaacgtacgttgtcnttgtgagtgtgagtactgtattaataatggttctatttgtttttacntgcangttttccttgttttgaaattttgtttttttcatatttgtatatcgattccgtgcattaattgtagtaattcaatttgtaataagattatgttaccctannnnnaaancncanngaggggccnttgtnagcnaaaaacccgggcgcccctanaaggattcca

SEQ ID NO: 17288 - DNA, 529 bp, Arabidopsis thaliana
  unsure at all n locations
  Clone ID: LIB35-034-Q1-E1-E1
aactggtttgccttggncctacggccccgggaaatcccaaagtcgacccacgcctccgtacngctgcgaagaagacgacagaagggatggtatcacaatattccaagaaagtcgatgagactctgaagctaggactcaaacaagctgtacttgtcnggttgttcttcggaggactaaacgcagctttcacattatctgttattacggttgttanttatggagcatacttaacaatatatggttccatgaccgttggagcattcacttccttcagtctttatagcctcacagttggttcatcggtatcctccttatcgagtttgtacacaactgccatgnaagctgcaagcgcnaagtanacnaatttttcaagatcttgggccngtgtttcctagcatgttcaanttcanggggataaagtgtcccnntccgtaatcccgatgggagaatgtnggaanttaaatgatgtccngggtttgcctaaccctctccgtccctaatcacatgatcctcaangggaatacctttg

SEQ ID NO: 17289 - DNA, 472 bp, Arabidopsis thaliana
  unsure at all n locations
  Clone ID: LIB35-034-Q1-E1-E12
gcgtccgtacggctgcgagaagacgacagaagggggcttcttttgtgatgggatacttcttattgttcgctgttgctttcatgtgtttggatgcgagaacggacaaaacgcaagattatacgtcgtttcagtaccataaaggagctctcctcaccggagacgtttccatcaacctaatctggtacggtaagtttaaaccgtcgcagcgtgcaatcgtaaccgatttcgttgcttccctctcgtcttcccggagatcgaccatggctcaaaatccctcagtcgccacgtggtggaagacggtggagaagtattaccaattccgcaagatgaccacgacacgtnggactcaagtctctccctcggagaacagattcctcgaacaaagggatactcaatgggaaaatctttaacaagagaaaaaacctcaaagacttggccgcaaaaggtggccaaagctacgcggttaacgtcn

SEQ ID NO: 17290 - DNA, 418 bp, Arabidopsis thaliana
  unsure at all n locations
  Clone ID: LIB35-034-Q1-E1-E7
atggagctctgcaccaggtctaccacaatcatcactcatctccctgcgagcttcaacggccatggatatctagcgggaaaatctgttgatagaatctcacttcctctccagcgaaacgttgcgtctctcgttcttcaatcccgcacgttgcgttgtagtagaaagtttccaggagaaacagttactgaagaaacatcaacaggagtcaatgagtttggtgtggaggatcgtgatggagtagttgttgcagccgaagagaaaaactcgaatagtggtgcgatagttgctctctacttaacgtctgcaatcgtcagttcactcgaagcaatccctctgtttcctaagctaatggaagtagttggtctcggatacacactccnggttcactacccgttatctgctatttaagaggaacaag

SEQ ID NO: 17291 - DNA, 468 bp, Arabidopsis thaliana
  unsure at all n locations
  Clone ID: LIB35-034-Q1-E1-F12
gcgtccgtacggctgcgagaagacgacagaagggggactccgagatggtagcgttgcctctgttaccgactccgatagaatcgaactacagggcttgcaccattccttatcgattcccttctgataatcctagaaaggctactcccactgagatctcctggatcgatctcttctccaattccatcccttctttcaaggaacgtgcagagagcgatacaaccgttccagatgctcctgttcgagctgaaaagtttgccaaaaggtatgcggagattcttgaggacctgaagaaagatccggagagccatggtggtccaccggattgcattcntctctgcagaattcgtgagctgatactaagagaattgggatttaagggacatatttaaagaaagttaaggatgangagaatgcaaaggcaatatcactatttcctgaagttgtccgtttgagtgatgctaattaacg

SEQ ID NO: 17292 - DNA, 578 bp, Arabidopsis thaliana
  unsure at all n locations
  Clone ID: LIB35-034-Q1-E1-F4
aaactgggttntgcctgtggccccttacggcctccgggaaattcccgaggttcgacccacgcccttccgttacnngcttgccgaagaaaggaacgaacangaangggggggaagaaataagattngaagaagaangaantaatttggattatccntggtnagaaaaattatgggctggcttcaatngatgccnacctccggttacatttgaaanccaagcctgggttttcacggttggagaaagaccggttggctaagaaggattaccgtcgctcacaaagagctcgtccctccttcaaaattgtcgccagtggcgtcaagaagatcaggaccgacaagcccttcggaattaacggcagcatggacttgagggacggcgtcaacgcctccggcagaaagggcaagggatacggtgtttacaagttcgtcgacaagtntggagctaacgtcgatggatacagtcctatttncaacgagaacgaatggtcagcgagtggtgacgtnttcaaggggaggagtcnccgggattggcaatttgggcngtaactctcgccnggaattcttgccngaggtgctcc

SEQ ID NO: 17293 - DNA, 386 bp, Arabidopsis thaliana
  unsure at all n locations
  Clone ID: LIB35-034-Q1-E1-G11
acagaggctagagagaatgggatgggaataagcttgtttcgcaggttatcagaagcccatcctcaggcaatttcagtgttacaaaaccagtaccgaatgtgtcgaggtattatggaactatcaaatgccttgatatatggagacagattatgctgcggttctgctgaagtagctgatgccacacttgtgctttctacctccagttctacttcgccatggcttaaaaagggtctggagccaacaaagaacagtttgtanttgttaatacagatatgccgcctgctttttgaagctanggattaagatgccattaacaatccaatttgaagccttcaatataacctgaaatnttnaaggacctanttaacaatggngttggtaattaa

SEQ ID NO: 17294 - DNA, 432 bp, Arabidopsis thaliana
  unsure at all n locations
  Clone ID: LIB35-034-Q1-E1-G5
agaagggggagaaagatcgaatcgaagaatggcagaattcgttgaagctgataacgcagaagcaataatcgcgaggatcgaaaccaaatcgaggaagattgaaagcctactcaaacagtacaaacatgtagaagctttgaaaacggctcttgaaggttcgcctccgaaaactcgcgatgaacgttgcaagtcggctaattggatagttgtgcacagagctttaatggccattaaggatattgacggaatgctcaatgctcttgatgtcgaatattacgacattctcatgaagtacttgtacagaggactttctactggggaccgacccatctgcgatcagtgcctgaagatcacgagaaactcactgagaanagctggtctcggttgcantctccgatgtcctactgataccatcaacaccgtttgatcaac

SEQ ID NO: 17295 - DNA, 481 bp, Arabidopsis thaliana
  unsure at all n locations
  Clone ID: LIB35-033-Q1-E1-G12
tagccgtcggaaaaggaattcnggcgtcgacccacgcgtccgtacggctgcgagaagacgacagaaggggccctgaaaaaatttcataattcaaagagtgttccttggagagaaaagtttcatcctttcaacagatctgaagagggtcaattgaaattcgttttcacgattcatccgccatttttccggggaaaaaacaaaaggtgagatcaaagaggaaaaatggcgcatagggtagaacaggattatgattatttgttcaagatcgtgttgattggtgattctggtgtcgggaaaacaaacatcttgtctagattcacaaggaatgagttttgtttggaatctaagtccactattggtgttgaattcgccaccagaactcttcaggttgaaggaaagactgttaaggcccagatatgggacactgcangtcaagagcggtatagagctatcacaagtgcttantacagaggaacggtta

SEQ ID NO: 17296 - DNA, 415 bp, Arabidopsis thaliana
  unsure at all n locations
  Clone ID: LIB35-033-Q1-E1-G7
agacgacagaagggtcgaccaggacggcggatccctcgaccaggacgatgaatggtcgatgaaaatctatcgggttcgaggaatggtcgaccaggggttgaaatcgtcgaccaggtccgagacttcatcgaccgtgtccgaggagtggtcgaggatttgtcgaccaggagttgaaatcgtcgaccgggaccgagaattcgtcgaccaggacggcggaatgctcgaccaggacgatgaatgggcgatgaaaatctatcgggatagaggaatggtcgaccagaagttggaatcgtcgaccgggtccgagaattcgtcgaccaggacgaggagtggtcgaggatttgtcgaccaggagttgaaatcgtcgancgggtcccgagaattcgtcgaccaggacggcgggaacctcgaacag

SEQ ID NO: 17297 - DNA, 489 bp, Arabidopsis thaliana
  unsure at all n locations
  Clone ID: LIB35-033-Q1-E1-H10
ctccgganaaggaatcgggcntcgacccacgcgtcantacggctgcgagaagacgacagaagggggcttatccttangacacgaaaacatgttccatttcaagtaaaagagttgagagtcacgaaagcagttctctcctgggatgtctaagtcagngcttgttgatggtctttgtcttcctcctaatgatccaaagaagattaataagatgattaggaaacgaatcaaagacacaactggttcaaactggtttgatatgcctgcaccaacaatgactccggagttgaaaagagatcttcagttgcttaagttgagaactgtaatggatcctgctgtacgctacaagaaatctgtgtcacggtcaaagctancctgaaaaatatttccangattggtacagtnattgaancacctgaagagttctatggaagattgactaagganggaatagaaaagcaacctcctgccngatgaatttgggtttcaaat

SEQ ID NO: 17298 - DNA, 254 bp, Arabidopsis thaliana
  unsure at all n locations
  Clone ID: LIB35-033-Q1-E1-H5
agaaggggctagaaaatcggttcaagactacgttgaccggtttggatgggattctgttgagaaagcaatcaaggcggctgaaaaagaaactagaacgcattgagatggaagatcaagagtcaagaaaaacattactctttggtttgtacatgtatgtacatagattgtatagagcnnnnnnnnnnnnnnnnnnnnnnnnnnnnnnnnnnnnnnnnnnnnnnnnnnnnnnnnnnnnnnnnnnnnnnnnngcggcc

SEQ ID NO: 17299 - DNA, 458 bp, Arabidopsis thaliana
  unsure at all n locations
  Clone ID: LIB35-033-Q1-E1-H6
gcgtccgtacagctgcgagaagacgacagaaggggggagtgaaggnnnnnnnnnnnnnnnnnnnnnnnnnnnnnnnnnnnnnnnnnnnnnnnnnnnnnnnnnnnnnnnnnnnnnnnnnnnnnnntcatctactttcttcaaccttcgagtccatcaatggtcactctcgagaccaacacaatcattctatagatgatttcgagagcattttcgacatcaccattgacgatttaagctgctctaacgaactcacgtgggatttctggnnnnnnnnnnnnnnnnnnnnnnnnnnnnnnnnnnnnaaaagatcgagtactgatcaagaaggctcaagttttgggttttgggagaataagccgacggattatgaagacaaagacttgggtctgaanctgaatctgaaccatcaagaagttatcgatgcttggtctgatcancaagaaacctctgtngacaga

SEQ ID NO: 17300 - DNA, 501 bp, Arabidopsis thaliana
  unsure at all n locations
  Clone ID: LIB35-033-Q1-E1-F3
aactggtttgcctgtncctaccgccccggaaatcccgantcgacccacgcgtccgtacggctgcganaagacgacagaagggagagagtagtagcttatgggagttggagaaaagaacctattgtccaagaaaacgagattcatcgtcagatgtcaaaaaccgattccttacactaacacttgcacctgaagatgtcaaggatggtaatttgcatcttccttgtcaattcatgagaattaatggcatcaacaagcctgggcagataactttgttgggtagaggcggtatgaagtggtttgcatatttactgtcaggagatggaactgccgttgtgggaaatggttggaaaggtttttgtgaggcgaatggtgtgatgttaggagagacttttgttttggattcattcccanagatgatacaaatcatgtagttaagttctacaccaagtagggagaccaaatacgtaaatgttaagtaagtacttttcaagattcncaaat

SEQ ID NO: 17301 - DNA, 510 bp, Arabidopsis thaliana
  unsure at all n locations
  Clone ID: LIB35-033-Q1-E1-H8
gtggttccctggccctaccagtccgganattcccgcggtcgacccacgcgtccgcccacgcgtccgcccacgcgtccgacggctgcgagaagacgacagaagggggctctctgaatattttagagagagaatacgctcttcttctcgccgtccggtggttatccggctacatgtccggcgtcttccgtttttctcaacggtgatggccggctttcgtctagcaccgactggcttcctaagtagcggtggccagcttttgtccggcatcgaccggctaacctagcggccatggccggattctgtttttgctttaatttttcaattatgtttttaatttgctaataatctcatcggatctacgattagggatgttgatctgccatatccacggtggttcttccttgtctcctgtcctttgagtttactccggattcgaattaagnttcctaactcctcaaagataaaatttccggatnccttttcctttggncctccnagatttacaagaaa

SEQ ID NO: 17302 - DNA, 417 bp, Arabidopsis thaliana
  unsure at all n locations
  Clone ID: LIB35-034-Q1-E1-A11
acanaaaaacattttttctctatanatcctttattattgttataaaaactccgatggatcggcaaaattccgatgacatcatgagatttctcgatggaatggctagctccgacgacgttcttttcggttttcttgacgaaggaaaccagtcaccggaagatttctccgtaaacctcaacgccggcgaagatgacggtgacnaagacgacnataataacaattctgaagataacaaagctttttggcaggaacacgaacaacttcttcaggggacactgtataggacaagttccattgagacanagattagacaagctacaaangaagcgttgatncaagttaaatctaagggtctttattgtgtttgccggcgaccagtggacggcggttgccggagttgcttacgtggcgaaatct

SEQ ID NO: 17303 - DNA, 382 bp, Arabidopsis thaliana
  unsure at all n locations
  Clone ID: LIB35-034-Q1-E1-A3
tttcaaaaaaaaatcagaaaccgtcaaaaagccaccgttgatatttcttccttgttgcttcttcaatggcgtcgttcgacgaagcacctcccggaaaccccgaagccggtgaaaagatcttcagaaccaagtgcgctcagtgtcacaccgtcgagaaaggtgccggtcacaaacaaggaccgaatttgaatggattgtttggaagacaatctggaacaactccaggatattcttactctgctgctaacaaaagcatggctgtnaattgggangagaagactctttacgattacntgttgaatcccaangaaatacatccctggaacaaaaaatggtgtttcctggactgaaaaaaccgcaagatcgtgccgattctcatccn

SEQ ID NO: 17304 - DNA, 429 bp, Arabidopsis thaliana
  unsure at all n locations
  Clone ID: LIB35-034-Q1-E1-A7
agaagggggatgtggcaaggctacacttgtgtttgcacttgattatcttttcaagacaacaaaaaagaagtcagcgacgatatccgtagacgatttttacttgactgcagaaggccaggctgaattgagaaaaaagaatccaggaaatgcacttctagagtatcgtggaaatgcaggaagtcatgatctgaaactttctgttgaaacactagaagccctgtcgaaactgaccaaagaaggcttaaagatgaaggtacctangtacaataagtctgcctatagtgggagaggtgacagggccgattcatcaacatggccctgaagttgaaggacctctatcggttattctcttttgaagggatggatgcttggttttaagcctccttccagctgacgttgttaaaagcagttgaacccacagctggangg

SEQ ID NO: 17305 - DNA, 515 bp, Arabidopsis thaliana
  unsure at all n locations
  Clone ID: LIB35-034-Q1-E1-B2
gcctncctaggggcccggaattccanagtcgacccangcctccgtagagaagacaacagaaggggttcttcagttggggaagaggattctgcggcggccctgatgttcatgcccctcagagcttgccttcacctctatctttcagagaagttgctgtaggatggaatcatgctttactactgaccgtcgatggtgaggtgttcaagcttggtagcactcttaataaacaacctgagaagcaacaactgcaaatagattcctctgaagctctctttganaaagttccggattttgatggagttaagttatgcagatagcagcaggagcagagcattctgctgccgttaacagagantggacaagttacgacatggggatgggggagaacattggtcagcctanggcctttggaaataccaatgaccaaaccatccctaaattggtgaagcctaaggaagtttnacacctgccnaacgaangnaattcaangttnattgncggaagttgaatttact

SEQ ID NO: 17306 - DNA, 503 bp, Arabidopsis thaliana
  unsure at all n locations
  Clone ID: LIB35-034-Q1-E1-B4
ctaggcctccggaaatcccaggtcgacccacgcntccgtacagctgcgagaagacgacagaaggggaggaaatggcgtctggatggggaataacgggaaacaaanggagatgctacgatttctggatggatttcagtgaatgtatgtctcactgcagagagcccaaagattgtacccttcttcgtgaagattacctcgagtgtctccaccattccaaagagtttcaaagaaggaacaggatatacaaggaggagcagcgtaaactaagaacagcttcgaggaaaggtgaagaaaccggagatgggactcacaaccatcactagtctcaaaaatcctccttcaaagcttcatcccgattccaagagaanaataataanaagggtcaatgggaagattttggtnccttggaatctctaaacgccttgattgtttttcagttttcaantttatccaatcaatgttctgcttcttttaagttaaatcctcnccttgagacgtatact

SEQ ID NO: 17307 - DNA, 438 bp, Arabidopsis thaliana
  unsure at all n locations
  Clone ID: LIB35-034-Q1-E1-B5
agaagggacagagaacaaacatagagaggttatagaccggtttcagatattgaaggagcaggaaacagagcgcaagctcaagtctcagaagctccctgattcagacattgatgttatagaccggtttcagattctcaagcagcaggaaacaaatcgcaaactcaaggctcaaaaatgtccaganacaaaaaagggtgaccaggaggacaaactagaaggttcagtgatggctaatatgggcagaagcagcgatgtgagtgatgttatggatagattccagatactgaaacgccgggaagctgancaantnaagaaatctctcaacagcatggatgtagattccggattcagaatatgaccagccacaagaagncttgatcatctctggtcagattcnttattcccaattaccttngacattcctcagagaagnacatt

SEQ ID NO: 17308 - DNA, 422 bp, Arabidopsis thaliana
  unsure at all n locations
  Clone ID: LIB35-034-Q1-E1-B6
agaagggggcagccgattcttctattanccgccatggtgaagtactcgcaagaacccnacaatcataccgagtcttgcaaggctagaggatccgatcttacggttcacttcangantactacggaaacagcgcacgcaatcacgaacctaccattgatcanggcgaagaggtaccttgaggatgtgatagctcacaagcangcatttcccttcacacgtttctgcacangtgttgggagaactgctcaagctannaacaggcactctaatggtcaagggactttngccatccaagtctgctcactttgttcctggattttgctcaagaacnctnagaaccaatgctgaaggttaaaaaggtttggatnttgatgcccctcttccatatcccacntnccaagttgaaacaaggccgcatngca

SEQ ID NO: 17309 - DNA, 512 bp, Arabidopsis thaliana
  unsure at all n locations
  Clone ID: LIB35-034-Q1-E1-B9
cggtcttnttgccctgccctacggaanggaatccggctcgacccacgcgtccgtacggctgcgagaagacgacagaagggagacacaggggccatcaccatgatatgggcagtgacggagctcgttaaaaacccgaaactgataaagaaagttcaaggcgatatccgagaacaacttggcagcaataaggagagaatcaccgaggaagatatcgagaaagttccttacttgaagatggtaatcaaagaaacattcaggttacacccagcagttcctcttatacttccaagggaaacaatggctcacatcaaagttcaagggtatgatattcctcccaagaggaggatcttggtcaatgtttcggcaataggaaagagattccaaactcctggacaaacccgaaagagtttgaccctgagaaggtttatgggatagcttttgttgattatangggacaacattacgaactcctancatttgggtccggtcgaaggatatgtcccgggatgcca

SEQ ID NO: 17310 - DNA, 58 bp, Arabidopsis thaliana
  unsure at all n locations
  Clone ID: LIB35-032-Q1-E1-A1
cncnccctgtnaccggngcaataaancccggcgggtnttggtggttaccccccaacgt

SEQ ID NO: 17311 - DNA, 444 bp, Arabidopsis thaliana
  unsure at all n locations
  Clone ID: LIB35-032-Q1-E1-A11
gcgtccganaagacgacagaagggggccgattagggtttcttctgtttcactatatattaagtgtctccaactactgagatctctatcctctccgccctctgttcttctcattggccgccatggtgaagtactctcaagagcccgataatatcgccaaatcttgcaaggcgagaggagccgatctcagggtccacttcaagaacactagagaaacagcgcacgccataaggaagctaccattgaacaaggccaaaaggtacttggaagatgtcatagctcacaagcaagctatccccttcacccgtttctgtcgtggtgttggtcgtaccgctcaggcaaagaacaggcattcgaacggacaaggtcgctggcctgctaaatctgctcaattcgttcttgatcttctcaagaatgctgagagcaatgctgaagtcaaanggttg

SEQ ID NO: 17312 - DNA, 357 bp, Arabidopsis thaliana
  unsure at all n locations
  Clone ID: LIB35-032-Q1-E1-A2
agtttaacgtcaaacgaagttgcgggtttggcagttggggctctgcttcttggtgccaccatcgctgctcctaaagttgatgcttttatcgctgcttctcagagaagatctcttggcatgtgtcgaaaatgtggagatcttaaagaatgtagcttgtggccgttgcaaaagaacaaggnacaatcaaatcaaggaggattccttgggtttcaagttgactcaatcaaaacacaaagatnaattggccttgccaataaatttgccaaagcccaaaaggtttgtttccccttgcccctgaaatngctcaaaatccttgaacaantttccnccggtaattttaaaattggttcaaccctn

SEQ ID NO: 17313 - DNA, 404 bp, Arabidopsis thaliana
  unsure at all n locations
  Clone ID: LIB35-031-Q1-E1-H9
aagacgacagaagggatctggactgtttttgtagtggcagcactggngtaacaattcttaaacaggggtctaatctcttcatgggaaacatcggggattctcgggccatccttggatcaaaagacagtaacgattctatggtggcaactcaactgacagttgatctgaagccggatttacctagggaagctgagaggatcaaacggtgtaaaggtcgagtatttgcgatggaagacgagccanaggtgccgcnantctggctaccttatgatgatgcacctggattagccatggccanggcgtttggtgacttctgtctaaaagagtatggagtcatttcagtacctgaattcactcaccgtgttcttacagacagngatnaantcaatggtcttgccnctgaa

SEQ ID NO: 17314 - DNA, 484 bp, Arabidopsis thaliana
  unsure at all n locations
  Clone ID: LIB35-032-Q1-E1-A5
gcatgcctgtnaaggtccanaattcccgggtcnacccacgcgtccgcccacgcgtccgcccacgcgtccgcccacgcgtccgtacggctgcgagaagacgacagaagggggatccattcatgctaaatggtgcttagcttaccacaaggagaactttgcttacgagcactgggatgacattctagacatctgtaaccagtatgatgtggctctttccattggagatggtctgagacctggctccatttatgatgctaacgacactgctcagtttgcagagctccttactcaaggtgaactaactcgccgagcgtgggaaaaagatgtgcaggtgatgaatgaagggccagggcatgtcccaatgcacaagattccagagaatatgcagaagcagttggagtggtgtaacgangcaccattctacacccttggtcctttgactactgatattgcccctggatatgatnacattacctctgccatt

SEQ ID NO: 17315 - DNA, 391 bp, Arabidopsis thaliana
  unsure at all n locations
  Clone ID: LIB35-032-Q1-E1-A6
atcaaaaagcttcgctgtggaggtaagtaggaggaagacgatggcgttagagaagcacatagagaagatactcttcagcgatgaagtaattgcgcaccgggtgaatcagcttggaatcgatattacttctgatttctccggtgactcggaggaaactcctatttttgtcggcgtagccactggtgcttgcctcttcttggccgatctcgttaggcgaattgacttgccaatagctatagatttcattagagctgagtcttacggctctgggtactgtatccagtggagttccaagagtatcatttgacttaaagcttgacatcacgacaagcacgttgtcttggncaaggacattgtggtactggcaatacacttacctgctgattganca

SEQ ID NO: 17316 - DNA, 388 bp, Arabidopsis thaliana
  unsure at all n locations
  Clone ID: LIB35-032-Q1-E1-A7
agtttcaggtagtttccatcgttcctttgtcaggaacaaaccaacgactcaaaatttaaccagagatggtggaaggtgaagaacagaggaggatcacacacttggatctgagaaacgagccccagtttccaatggttttcgttagagaatcgacttgtttcgctaaggacgatctcgctatcttcccgtcgagactctcagattcgtccttctctccgtccgattcagacgaacaatttcaatttagccggaaatcgcattctcanccatcggaagatgtcgggaaatctccgtggaaatccgtaattgagattgatattatccaaggttggtgggaagattcttcctcgttcgagtaatgtcaaatttccagaatttgggttacctg

SEQ ID NO: 17317 - DNA, 383 bp, Arabidopsis thaliana
  unsure at all n locations
  Clone ID: LIB35-032-Q1-E1-A8
ccagaagaagaagaagaaaccaaatcctggcacctccgggataagtagctccaatggaggaagaagtggtggctcgagagctgagcaagagagaagaaaagggattccatggactgaagaagagcatcggtnnnnnnnnnnnnnnnnnnnnnnnnnnnnnnnnnnnnnnnnnnnnnnntagacttaaaagagtgaaaaaagatttggaagattctttacctttattgaatactctgttttgtttggaaggttgtttcttttgggtttggacaagtttgggaaaggagattggagaagcatttcaaggaactttgtgatctcaagaactccaacacaagttgcaagtcatgctcaaaaatacttcatcangcttaactccatga

SEQ ID NO: 17318 - DNA, 413 bp, Arabidopsis thaliana
  unsure at all n locations
  Clone ID: LIB35-032-Q1-E1-B1
aaaagtgtggagtacatgccgtttagcttatccttgactcttaccatcagtgcggtcatatggctcctttatggtcttgctcttaaggatatctatgttgccttcccaaacgtgattgggtttgttctaggtgcacttcaaatgatactctatgtggtttacaaatactgcaaaacgccgtcggatttggttgagaaagaacttgaggctgcgaaattgctagaagtgagcatcgatatggtgaagttaggtacactcacatctcctgaaccagtagcgatcaccgtcgtccgatcggtgaacacatgtaactgtaacgatcgaaatgctgagattgaaaatggtcaaggagttagaaacagtgctgcaactacttgagtttgctcaagaaancctaataaagaaacctantt

SEQ ID NO: 17319 - DNA, 412 bp, Arabidopsis thaliana
  Clone ID: LIB35-032-Q1-E1-B11
aagacgacagaaggggaaaattcgatcgatagtgacgagaaagatcctaagatggcgaccgcaagcgagagttcttcatctaagagatggcttccacttgaatctaacccagatgttatgaatcagtatctctggggacttggtcttgcccctgatgaagcagagtgcaatgatgtgtatgggttagacgatgaacttctagagatggttccaaagcctgttcttgctgttctcttcctttacccaatcaccaaaaagagtgaagaagagagaatcgagcaagacaaggaaattaaggaaaaggtgcatagcgataaagtttactttatgaaacaaactgttggtaatgcttgtggaaccattggtcttcttcatgctattgggaatattacctctgaaatcaaactctccc

SEQ ID NO: 17320 - DNA, 389 bp, Arabidopsis thaliana
  unsure at all n locations
  Clone ID: LIB35-032-Q1-E1-B4
ttcagaagtctcttgctgcatacattaaaaatcacgtttattcaaacgcgaagacagaagatttatggacctgagccaagagaaaacacgaatcttaggttctttagcatcttgcccagaccccactatagttcaagatgttcttaacttcgtattgtctgatgaggtccgtaatcaagatgcactttatgggaccttccgggtgtaagttgggaanggantnaaagtnacttggnaatggntncaagnaaagtgggaatntatangaaacacatggggctccggatttctcataacacgcttcataagtgcaattgtatcgccgtttgcgtcgtttgagaaagccaaagaagtggangagttttttgcaacaagatnaaagccttcga

SEQ ID NO: 17321 - DNA, 401 bp, Arabidopsis thaliana
  unsure at all n locations
  Clone ID: LIB35-032-Q1-E1-B5
ggtggtggtggaggtagccgcggaaatggatccggctatggaaaggtggaagggagaaggctccagctgctttctgtaggaaggctcagacttccactgataggtttgagatgtgggganatgggcttcagacccgttcttttacctttatcgatgagtgtgttgaaggtgtactcaggttgacaaaatcacatttccgtgagccggtgaacatcggaagcgatgagatggtgagcatnaatgatatggctgagatgttctcagctttgaggaaaanaanttcnaattcancacattcctggccccggaaaggtgttcnttggtcctaactcagaccaacaatcctgatnaaaagaaaaagcttgggttgggctccctaattattnagattgaacgaaggg

SEQ ID NO: 17322 - DNA, 398 bp, Arabidopsis thaliana
  unsure at all n locations
  Clone ID: LIB35-032-Q1-E1-B6
ggtaagctcaagagaggctgagtacactgagctgcgatcggcgactgtctcttgtccgggatagtgaaagatgaagctgaaggttgtgtatcgtaaggtctccgattacatctgttacgatctgaaagaaatcgtcttaccttcatcacttcccgatcctcctcacgtcgttaaacgccgcaaattgacttggcacgagcgattcctcgtgttgaaggaagcttcaaggctttatgctgcaagctggggtaagagatatagtcctgaacttcgtcaaaatgattacaagaagcaaggggatgctgagcctaaaaaacaaccaaaagggggaagagaacnagcctctgttttggaagatcttgcggtaactgcaagaaggtggaatggagactttaagg

SEQ ID NO: 17323 - DNA, 399 bp, Arabidopsis thaliana
  unsure at all n locations
  Clone ID: LIB35-032-Q1-E1-B8
ctgaaaaaatttcataattcaaagagtgttccttggagagaaaagtttcatcctttcaacagatctgaagagggtcaattgaaattcgttttcacgattcatccgccatttttccggggaaaaaacaaaaggtgagatcaaagaggaaaaatggcgcatagggtagaacaggattatgattatttgttcaagatcgtgttgattggtgattctggtgtcgggaaaacaaacatcttgtctagattcacaaggaatgagttttgtttggaatctaagtccactattggtgttgaattcgccancaagaactcttcaggttgaaggaaaagactgtttaaggccaagatatgggacactgcaggtcaagaagcggtataaactatcacaagtgccttatta

SEQ ID NO: 17324 - DNA, 418 bp, Arabidopsis thaliana
  unsure at all n locations
  Clone ID: LIB35-032-Q1-E1-C11
gcgtccgtacggctggagaagacgacagaagggatgcaaagtacgaaaaggcgaagattgtttacgagaagctatggaatggttcttacttcaattatgacgatagtggtagtggctcgagctcttcgattcttgctgatcagttggctggacaatggtatgcacgagcgtgtggattgaagccgataacgaaagaagaatggataaagaaagcactagagacgatctatgagttcaatgtgatgaaagttaaaggagggacacgaggcgcagtgaacggaatgtcaacggaaggaaaagtggatgcaaattcgttggtttcaaaggaagtttgggctggtactacttactctgttgcagcttgtatgattcaagaagggcaaagagaaaaaaggtttcagacaacaagtggnatcta

SEQ ID NO: 17325 - DNA, 302 bp, Arabidopsis thaliana
  unsure at all n locations
  Clone ID: LIB35-032-Q1-E1-C12
cctgccngtaccgaaccaaaattcncgggtccacccacgcgtccgtacggctgcgagaagacgacagaagggttacggctgcgagaagacgacagaagggttacggctgcganaagactacagaagggttacggctgcnagaagacgacagaagggttacggctgcgagaagacgacagaanggttacggctgcganaagacgacagaanggtacggctgcnanaanacnacagaagggtacggctgcgagaagacnacacaangggtnnnnnnnnnnnnnnnnnnnnnnnnnnnnnngcgg

SEQ ID NO: 17326 - DNA, 278 bp, Arabidopsis thaliana
  unsure at all n locations
  Clone ID: LIB35-032-Q1-E1-C7
ctcgtgtttgtttagtgaagcgatcaagcgagcgagatcagtcaaatagctttttcattgttcctcagatcgaagaagaagaagaagagcttagcaacaatggcggcgaaaccgattgcgagtccgattccggtggcgctgtatccgactttattgggtgttcactcttgcgattggtctcgtcattaccgctatcttcctcatcctatgaagcctacatcatccangaaaaaaccgaaaccntcggaaaggactcgctacttcagcaattgcatctg

SEQ ID NO: 17327 - DNA, 359 bp, Arabidopsis thaliana
  unsure at all n locations
  Clone ID: LIB35-032-Q1-E1-C8
gatcaagacttttgcaataagcttgccaaagaagaaaacctcgtcgttttaccagggattgcattcagtcagaagaactggttgaggcattctatcgatatggagactccggtattggaggatgcattggaaagattgaagagcttctgcgatcgccattccaacaaaaaagctcccctcaaagacgtcaatggtgttaagtaaagggtcaatatggttatttgcctaagtcatttacgtatgctataatgataaataaatgagtgtttcctggtttgaggtaaatcatgaacactttagtggtatttgtaacaaataaaatgggtgcacttaatatcaatcgtgtgtaatgttttcnc

SEQ ID NO: 17328 - DNA, 492 bp, Arabidopsis thaliana
  unsure at all n locations
  Clone ID: LIB35-031-Q1-E1-G2
tgttacgcctgcccgtctacgccggnccagtatcggtcgaanantcacgcgtccgtacggctgcgagaagacgccagaagggcacagaactttggctggagtatgagaacaatgcttctttagaagcaaatattgtanangacttcgataaggttgagatgattctccaggcgctagaatatgaagctgaacacgggaaagtgctcgacgagtttttcatatcaacagcaggcaagtttcaaacagaaattggnaaaagctgggctgctgagatcaacgctaggagaaaaagccaattgacaaacaggcagagatagtaaaatccagttgcatcataccttcaatcttcctcaactatcaacagtagaatctcgggaactaagcagactcctcatgaancaaaaggtacaagcttctaatganattttcagtttgtagttcaacgancacaagtccctggttttttaacctccccctttgggtaccaanttg

SEQ ID NO: 17329 - DNA, 455 bp, Arabidopsis thaliana
  unsure at all n locations
  Clone ID: LIB35-031-Q1-E1-G3
gcgtccgtacggctgcgagaagacgacagaaggggaggagagagatatggagagaactttgcttcaatggagactattgcctcttctcgcactcatcgttgctcttttctccttcttcttcgcttcncctcgctctttacaggggaataatanttgtagtcttcttcctcatgatcattactggatctcaagtaaacgcatcgtcacacctaatggtctcatctctggttctgtggaggtgaanggaggaattattgtgtcngtggtgatngaagttgattggcataatagtcaaaggagtcnantgaaagtgantgantatggagaaactgtcctcatgcntgntctcattgatgtgcatgttcatcttgatgntcctgnaatangtnaatgggaanggtttccttctggaactaaggctgctgctgctggggggaataactacattggttgac

SEQ ID NO: 17330 - DNA, 537 bp, Arabidopsis thaliana
  unsure at all n locations
  Clone ID: LIB35-031-Q1-E1-G4
aactgtttacgcctgcccgtttacgcgtgcccantntcgnnnggaaanattcaacgcgtcccgcccaacgccgtcccggccccaagccgtcccgtacngggctgccaagaaagaccacaagaaagggttacgggctggcgaagaaagacgacaagaaagggggggcgatgnaatcaagctggcaagcaactcccaaaaaccaggggggaaatctcccgccgggtgcacccttttgtancgccgttgtcgtatctattaggaacatggagaaggacaaggagaaggtgaatatcctactataccgtctttccgctacggcgaagagatccgtttctcacattccggcaagccggtgatagcgtatacgcanaagacatggaaattggnatcaggagctccgatgcacgccgagagtggtactttcgtccaanaccagatggtctattgaagtctcattgctcaaaacacaggtctctcnaantcaanaaagggacatncaatgttgntaacaatccatcaaactccaaaatggtnttg

SEQ ID NO: 17331 - DNA, 416 bp, Arabidopsis thaliana
  unsure at all n locations
  Clone ID: LIB35-031-Q1-E1-G5
ggctgaagacnacagangggggagagtgagtganagaagaatcagagaaaatgcngccgaaattggatccatctcaantcgtcgacgtcnacgtccgagtcaccggaggtgaggtcggagcancgtcttcactcgctccaaagatcggtccacncggtctggcaccaaagaagatcggagaagcatcgccantagagacagcgaaagaatggnaaggtcttcgagtcaccgtgaagcttacggtacagaatcgtcannctaaggtcacantggttccatccgcagcggntctagtcatcaaagccctcaaggagccagagagagatangaagaaagtgatcaacatcaancataatggcatcatttcgtttgatgatgtgantgagattgctnanataatgcgtcctaaatctatc

SEQ ID NO: 17332 - DNA, 403 bp, Arabidopsis thaliana
  unsure at all n locations
  Clone ID: LIB35-031-Q1-E1-G11
gcccacgcgtccgcccacgcgtccgcccacgcgtccgcccacgcgtccgtacggctgcgagaagacgacagaaggggggaggaagaatcagattcaaaagccaaaatcaaagcttggtgatgggatctggagcattaacatttggtatgtgccaaagaagatggatatcttcagaaaaccagacgatgtgttaacagctgctgagaagtacattgcagagaatggacctgatgcttttgagaagatcttaagccgggctgataaatcaaaaagatataataagcatgaatatgaaagctatgaaacgatgtatggtganggttatcagtactaagagaaatttgaaaaagcttttaantttaaatgtgtgaagcaacttcagtcttggtgttgttaagcctcc

SEQ ID NO: 17333 - DNA, 423 bp, Arabidopsis thaliana
  unsure at all n locations
  Clone ID: LIB35-031-Q1-E1-G6
ggctgcgagaagacgacagaaggggaaagaagaaagaagaagaataaaagacaaggcttgaacgtccggtgaaagaaagaattcggctttccgcactaaccacttctgaatcctaaccaacaagcttctccatttcgtttttcgcgtctcgattccaaattccacttaagacggcggattttctcaccgggaaattggttttagatggataggactgaggaaatcgaanaatcccccgccggaccttcttccggatccgcgaaattgaagctcggaaacagagcaaatcctttccttgttgtttgtanatgcntcaacctcgttacctctctcaaccgcaattcnctgtgttgccgttaacgttccnccctgccgnttcgctccttcccttgaaanccanantcccttcaatgggaaattccc

SEQ ID NO: 17334 - DNA, 448 bp, Arabidopsis thaliana
  unsure at all n locations
  Clone ID: LIB35-031-Q1-E1-G7
gcgtccgtacggctgcgagaagaccagaaggggtgtttgagaagcgggattggtgatcggagctggaatttggttggtaatcggaggtcagagagaagtcaacggatatgccggaggaagaatcgatagatatcaaattcaggttgtacgatggctccgatatcgggccttttcggtantctgcggcttctactgttgactttttgaaccagagggtcgtctctgattggcccaaaggcaaaacagttgttccaaaggggataaacgaagtgaagctgataagctcgggtaagatcttggacaacaacaagactgttgggcagtgtaagacaccatttggagatattgctggtggagtcattgtgatgcatgttgttgtacagncttctctagctaaatcnatnacagagaataaggttgataaagcaccaaaggcagtaatctgcac

SEQ ID NO: 17335 - DNA, 408 bp, Arabidopsis thaliana
  unsure at all n locations
  Clone ID: LIB35-031-Q1-E1-H10
gaagacgacagaagggnacngctgcgagaagacgacanaagggtacggctgcgagaagacgacagaagggtacngctgcgagaagacgacagaagggtacggctgcgagaagacgacagaanggtacggctgcgagaagacgacagaagggtacggctgccagaagacgacanaaaggtacggctgcgagaagacnacagaanggtacggctgcgagaagacgacagaaaggtacagctccaanaagacnacngaangaaaatggnagataaccccactcaacaggatccaantnaagctaccataaaactgttatcaatgctctcaacagtttcntctcntcnaattcncgtnaccattnaattgttctgttttanatttccttccctttcaaatttaacccnttga

SEQ ID NO: 17336 - DNA, 415 bp, Arabidopsis thaliana
  unsure at all n locations
  Clone ID: LIB35-031-Q1-E1-H12
agaanggggaaatccaacgatttataagancntcgtccggcnttcgacggtctgctgacgaagaccatggggccnattttcaaatncannnnnnnnnnnnnnnnnnnnnnnnnnnnnnnnnnnnnnnnnnnnnnnnnnnnnnnnnnnnnnnnnnnngaggatagtaacacgatcacnggtagantgagggttccagcaagcaccgtgattggtcatgcagctaaattctcaaatatcaaagttatactcaacggtggacagcatgttactttcctcaagccggatggatactttaccttccacaaagtgccagcggggactcatctgattgaagtttaagcactgggctacttcttctccccaagtgcgaattgatgttantgctccggcaacntggcaaaggtcaaacaacacn

SEQ ID NO: 17337 - DNA, 508 bp, Arabidopsis thaliana
  unsure at all n locations
  Clone ID: LIB35-031-Q1-E1-H2
antgtttcgcctgcccgtttacgntgcnanattcgcgtggaacacncacgcgtccgcncacgcgtccgtacggctgcagaagacgacagaaggggcctgaggaaagaaaaggagctccaaagggctgaacgcgagagacgggaacagcaagaagcccaggagcgagaagctcaggctgcactcaatgacggagaagtgattagcatccactcaacaagcgagctagaagcaaagacaaaggctgctaagaaggcatcacgtctgctcatcctttacttcacagccacatggtgtgggccatgccgatatatgtctcctctgtactcaaacctggccacacagcactcgagagtcgttttcttgaaagttgatatagacaaggccaatgacgtggctgcttcttggaacattagcagcgtcccgaccttttgcttcatcaganatgcaaaaaggtggcaaaattntcggactgataaaaggtcnctnancanaaaaattcacaacactc

SEQ ID NO: 17338 - DNA, 506 bp, Arabidopsis thaliana
  unsure at all n locations
  Clone ID: LIB35-031-Q1-E1-H4
aactgtctcgcctgcncgtttacgcctgcaagttcgcgtgcgnacantcacgcgtccgtacngctgcgataagacgacagaaggggagagangcaaataatatattcagtagcaanaaaaaatctgggatttctaaaaaaaggtaagaatgaaaatggcggatcagctcaccgatgaccagatctcagagttcaaggaagcctttagccccttcgataaggatggtgatggttgtatcaccaccaatgagctcggaaccgtgatgaggtctctggggcaaaacccaacagaagctgagcttcaagacatgatcaatgaagttgatgcagatgggaacgggaccattgatttcccggagttcctgaacctgatggcaaggaaaatgaaggacactgattcanaggaagaactcaaggaacctttaaggttttgataaagncaaaatgggttcatacctcaacnaancttnncatnnntgcnaatctccgtgagaaacttccnatgag

SEQ ID NO: 17339 - DNA, 482 bp, Arabidopsis thaliana
  unsure at all n locations
  Clone ID: LIB35-031-Q1-E1-H6
tttngcgtgcccgtttacgntgccaagtatcggtcngaacattcncgggtccacccacgcgtccgtacggtgcgagaagacgacagaaggggatagtaaatccagagaacgtctcttcttcttcttcacttgccggagaagatggatttgttgttctgtttccgaccgaatcagacttgtcggggaatttcagttttgcctgcttttagcataagcaatctttccgccgtcaatcgtttccgttcgacgacgagtcttcgttttggatttccggcgacgccgtttcgtcggactccaaactttaccttcaaaactcacgcgaagaggaagaataaaacgagtactttcgaaccgaaaccgaataaagtcgaangagttgatcattgaangaagaaagaagaagaggagatnggttcttccccgaangaggattcaagagaatcaagacgaantttgctactgggttgatgaattttgacgaa

SEQ ID NO: 17340 - DNA, 499 bp, Arabidopsis thaliana
  unsure at all n locations
  Clone ID: LIB35-031-Q1-E1-H7
gcctcacccggntcataccggtccananattcccgggtccacccacgcgtccgtacggctgcgagaagacgacagaagggggagtccaagagtagtggtgaaggtggatttgaagaagaagccatggcagcaggaccagccattgcacaatagatggcatccggagataccaccagcagcagaggtcaaggctggtgagtttttccgggtagaaatgattgatgcaatgggaggcgttatcaaagacaatgactctgcangcgatatcaagaacctagtcctaactactggttgtagatgangaaggtattgcagctaaagcaggtgatcttcttgctgttgagatatgcaacttgggtcctcttccatgagatgaatggggattcactgggttcgtttgattanananaatggtggccggttccttgacttgacaatttcccttgtgcaacaaaagctatttgggtactttgaaggattcaancccaatccccctcag

SEQ ID NO: 17341 - DNA, 473 bp, Arabidopsis thaliana
  unsure at all n locations
  Clone ID: LIB35-031-Q1-E1-H8
aatcgcgggganattcacgggtcnanncangcgtccgtacggctgcgagaagacgacagaagggtacggctgcgagaagacgacagaagggtacggctgcgagaaggcgacagaatggtacggctgcganaagacgacagaagggtacggctgcgagaagacgacagaaggggtccgatcaaaatccttttaagctctgtagacccaggttacgcagagaanaagaacagaacaaggaattatataatcatcggcttgatcaatctgaattgcagttcatggcgctaaaccctcaattactacccaatgggatgcctgttccctttgttaatgaaatgttcgtcctantccgagatggtgttgaattttgaagtcgacaagattccctggagggtaatggagggtcangtttaagggccaanggggttaatttacctttgncaaaaaaaaccgggttgggcccttggnttcaa

SEQ ID NO: 17342 - DNA, 400 bp, Arabidopsis thaliana
  unsure at all n locations
  Clone ID: LIB35-031-Q1-E1-B6
ggctgcnanaagacgacagaagggtacggctgcgagaagacgacagaanggtacggctgcgagaagacgacagaagggtacggctgcnanaagacnacagaanggtacggctgcganaaaacgacagaagggtacggctgcganaagacgacagaagggtacggctgcnagaagacgacagaagggtacggctgcgagaagacgacagaagggtacggctgcgagaagacgacagaagggtacggctgcgagaagacgacagaanggtacngctgcnagaagacgacagaaggggtncccaattgtgcccttgttggttcagatactgaagagtcaagaaaccacntgttggtaatgatgatgttccgttgtcctgaatgatggcttnttccttcccaat

SEQ ID NO: 17343 - DNA, 424 bp, Arabidopsis thaliana
  unsure at all n locations
  Clone ID: LIB35-031-Q1-E1-B7
cacgcgtccgnngggtgncaaaagacgacagaacggnggagagattgttgcggcggngattgggngaggaaagctttgtaagtggaggactttgccaaacgcagacgctacttggaaaaanngtcacgcggctganagagtaatcgttgcgtgttcaaacgttggttttagcgatttgaaacttgcgtttangaataatttgagttttctctcaacgtcaaaatattgaatttaatcgtgtccgttaaattcaaagcttctagtcactttggcaatttcgtgttagctcttttcaacganactttanngnaaagctattgtgagatggattttacaggatgtantaatttgatagnttgaagtggattacgtggatacaaaangtccaattgacanccanaaaaacnggccccccaataggntc

SEQ ID NO: 17344 - DNA, 421 bp, Arabidopsis thaliana
  Clone ID: LIB35-031-Q1-E1-B8
gcccacgcgtccgtacggctgcgagcagacgacagaaggggatctcactttgttcatctaaaaactcctcctttcatttccaaacaaaaacttctttttattctcacatcttaaagatctctctcatggcgatgtctttctcaggagctgttctcactggtatggcttcttctttccacagcggagccaagcagagcagcttcggcgctgtcagagtcggccagaaaactcagttcgtcgtcgtttctcaacgcaagaagtcgttgatctacgccgctaaaggtgacggcaacatcctcgatgacctcaacgaggccacaaagaaagcttcagatttcgtgacggataaaacaaaagaggcattagcagatggtgagaaagcgaaagactacgttgttgaaaaaaacagtgaaaccgcaag

SEQ ID NO: 17345 - DNA, 409 bp, Arabidopsis thaliana
  unsure at all n locations
  Clone ID: LIB35-031-Q1-E1-B2
aagacgacagaaggggagggtttaagaaatcttccgagaaaacagagagacagaaaaatggtgatgatgaagaagatgaagggaagccaaagctttagacaaagacttcttctttcaacactttcttcagcacctatctcgattgatgagattcgtgccgacgaaacgattcctggtctccgacctcacgaggttaatcttctccgcctcttagaaattgtcaccgacgacgccgtcgttgatattaacgagaccgggactcgattaaagtacaagcctggaactatagtgggagggaaagaacttggttcacagctgctcgctgagtcgattcattggctattancctgagccaatgcntttgttgggaatgtttgggaagaaacctccttcgaataaggtcaaangg

SEQ ID NO: 17346 - DNA, 431 bp, Arabidopsis thaliana
  unsure at all n locations
  Clone ID: LIB35-031-Q1-E1-C12
gcgtccgtacggctgcgagaagacgacagaaggggattcaccggttgttatatcgtcgattcatcgtcgtcgacggcgagtacttgtgacctccacacccagattaatcttctataactgattttatcgcttagacgatcacgatctcatcgattaactgacaaatgaagcatgtagtaaagatcttgagcctgttggtggctatctctgccttctggattggtcttttgcaggctgcaattattcctcgaagccatacatggttgctaccgatctactttgttgtatccctcggatgctatggcctattaatggttggagtcgggctcatgcagtttcctacttgcccccaagaagcanttctgctgcanaangatattgcaaangctaanggcttcctcaagcacaaaagggtatatgttggatntaat

SEQ ID NO: 17347 - DNA, 414 bp, Arabidopsis thaliana
  unsure at all n locations
  Clone ID: LIB35-031-Q1-E1-C5
aagacgacagaagggggaccttttcgatttcgtctccattgatgatattcgatagttagtggctaatttgctancatctcactgcttcaattttggctcctcatcggaaatggcgtttttactcaacacctcgatttcatctcacctccgatcttcttcccataagacggatggtgctttagctcaatcccgtcgcgggttccatgtggagctaggtgctcgtgagaaagctctcttggctgaggatgcatctttgaggagattcaagtcgcataaganaggtgttcatagattgaaaagaantggagatgtgctcacaagttgtccnttgtccnctgggatgctgctatgagatcaagccaacagtgatganaaaggaaactcaaggctgcatnacgaaactcaagaatttcc

SEQ ID NO: 17348 - DNA, 419 bp, Arabidopsis thaliana
  unsure at all n locations
  Clone ID: LIB35-031-Q1-E1-D5
aagacgacagaagggtacggctgcgagaagacgacagaagggtacggctgcgagaagacgacagaagggtacggctgcgagaagacgacanaaggggaccaaattcaagaacaagaaaaaacttttcctttgaaacanagaaacatggatttctttaccgatcaagtaaagaagaaattctccgacaagaaaccggagagctctgatccggagccaaaccacaacaannacaaacccggtcacacggagccaacaacacataaacccggtcacggcgagccaacaacacataaaccggtctccaacaccgattcancaacacacagaccggctacgaacgctgagctcatggctagtgccaagatcgtagccgaagctgctcaagccactgctcgtcacgaagtcagacaagcttgaca

SEQ ID NO: 17349 - DNA, 405 bp, Arabidopsis thaliana
  unsure at all n locations
  Clone ID: LIB35-031-Q1-E1-D6
ttgaatttagtttctttccttattttgtttgaggtttattatattgatgatagggttttggaaacttttttaattgattttagcttatagagaccaaaaaccctagaaaaatacgattcctacgacggcgacggttgatgatgagccgggacagattaaacgtgctctgattgatgcttctgccggagctatctctggtggtgtttctcgttctgtaacttctcctcttgatgtcattaagattagatttcaggttcagctagaaccgacgacttcatggggtttggttcggggaaacttgtcaggagcttctaagtatactggaatggtacaggcgactaaaagatatatttagagaanaaggtttccgggggttttggcgggtaatgtgcaaccttgcccagg

SEQ ID NO: 17350 - DNA, 444 bp, Arabidopsis thaliana
  unsure at all n locations
  Clone ID: LIB35-031-Q1-E1-E12
gcgtccgtacggagaagacgacagaaggggaaaggattgctgacgagtttttggacaagctggtaaagtggaccaagaacattaagatttcagatccttttgaagaaggctgtangcttggtcctgttgtcagtaaaggacagtacgaagagagttctaaagtttgtctcaaacgctangaatgaaggtgcaactgttctttgtggaggagttcgtcctgagcatttaaagaanggatactttgttgaacctgcgattgtttcaaatgtgactacttcaatggaaatctggagagaagaagtctttggtcctgctctgtgtgtgaaaacattctccaccgaggatgaggcaattcagcttgtaaatgactctcaatatggattaacaagcgcaatattatcaaatgatctgganccgtgtgatctgttaataaagngtttcaaa

SEQ ID NO: 17351 - DNA, 517 bp, Arabidopsis thaliana
  unsure at all n locations
  Clone ID: LIB35-031-Q1-E1-E2
gaactgtttcgcctgccctttncgcgtgcccaaaattcccggggaancacncacgcgtccgcccacgccgtcccgtacgggctgcgaagaagacgacagaagggggtacataaaagcttaaaagaaaacacaaagaatggggagagcaagagaaatatgagaaggaaactcatcgtcgttaagggaacaacgaaacctcagagagaaggatcgaaggatgcgcatgaaacatctcttctctatactttctcctcatgtttctcccactcgcaagttaccagtgcctcaccttatagatcaagcgacatcatacatgatccaattgaaagagaatgtaaattatttgaaagagaagaaaaggacattgttacaaggagaactcgggaatctctacgaagggtcgtttcttctacccaaactcagtattcattcgcgggattcgaccatagaaatgaatccgatcatggntctaaacatgaaaagagtatgttccccgagcctgtgagtattttganga

SEQ ID NO: 17352 - DNA, 506 bp, Arabidopsis thaliana
  unsure at all n locations
  Clone ID: LIB35-031-Q1-E1-E4
actgttaccctgccnttaccggtgccaaattcccgggangacccacgcgtccgtacggctgcgagaagacgacagaaggggatatccacaatacanaacacaactttcatatataacaaaaaaagttatagaaatggccaaagacgtggaaggacctgagggatttcagacaanagactacgannatccgccaccaactccgtttttcgatgcggacgagcttaccaagtggtctttatacagagccgtcattgccgagttcgtagccactcncctcttcgtgtacatcaccgttttaactgtcatcggttacaagattcagtcngacacaaaagccggtggagttgactgcggcggcgtcgggaatccttggcatcggcgtgggcttttgggnggcaagattcttcaatccctggccaacgggcaaccgcccgggtatcccaanggtgggccaaattaaancccggccgntggacntttttgggttggttccctaanccccggga

SEQ ID NO: 17353 - DNA, 430 bp, Arabidopsis thaliana
  unsure at all n locations
  Clone ID: LIB35-031-Q1-E1-E9
gcgtccgtacggctgcgagaagacgacagaagggggaggaatgatggaatcttcagctttaataaatctgcagactctcaaaattccgattcatcttattgaagaacaattttccggcgaaacggccgatgaagtctcgcctgaatcttctgtacctttcaccggcgattgacttcacttcagaatcgagagagaagaaatcgatggaaaactaaaaatagaaagagtttcaaattctcgctctctcttcaaaaccgcaaatcaagggaacgagagacgagagagagagatgagtaaacggaatccgaagattctgaagatttttctgtatatgttacttctcaactctctctttctcatcatctacttcgtttttcactcatcgtcgttttcaccggagcantcacagcctcctcanatataccacgtt

SEQ ID NO: 17354 - DNA, 403 bp, Arabidopsis thaliana
  unsure at all n locations
  Clone ID: LIB35-031-Q1-E1-F10
gtgaccangcccgggcgactgtttaccaaaaacacgggtctccgcaaagtcgtaagaccatgtatgggggctgacgcctgcccagtgccggaaggttaaggaagttggtgacctgatgacaggggagccggcgaccgaagccccggtgaacggcggccgtaacgataacggtcctaaggtagcgaaattccttgtcgggtaagttccgacccgcacgaaaggcgtaacgatctgggcactgtctcggagagaggctcggtgaaatagacatgtctgtgaagatgcggactacctgcacctggacagaaagaccctatgaagcttcactgttccctgggaatggcttttggcntttcctgcgcaacttaagtggaaagcgaaaaaagcccctttccgggggggc

SEQ ID NO: 17355 - DNA, 394 bp, Arabidopsis thaliana
  unsure at all n locations
  Clone ID: LIB35-031-Q1-E1-F12
cgtgggcggctgcgagaagacgacagaaggggataagccgcaagtctctctctataaacaccgccattgattagcttcctctctatttttactctcgtcacgccctccacttttgggtcattattacttctcgaagctcaccaagatcttgaatttgccgacctctcaagattcttgatggtaaaagcatacagacaagagcatgtttacaagcatccgtgggagcgggtgagtgctgcttcatggaggaagtttgcagaccctgaaaacaaacgcatcctttctcacatccttgaagtcgataccttgaacaggaaactcganactgagaccgggaaactccacaccacgcgtgctctcaacatccatgctcctgggtccaagggttctccan

SEQ ID NO: 17356 - DNA, 345 bp, Arabidopsis thaliana
  unsure at all n locations
  Clone ID: LIB35-031-Q1-E1-F2
aactgtctcgcctgccctcttcgcgtgnccaaattcccgggnacacccacgcgtccgtacngctgcgagaaagacgacagaangggtacggctgcgataagacgacagaatggtacggctgcgagaagacgacagaagggtacngctgcnagaagacgacagaagggtacggctgcgagaagacgacagaatggtacggctgcganaagacgacagaagggtacggctgcgagaagacgacagaagggtacggctgcgagaagactacagaagggtacggctgcnnnnnnnnnnnnnnnnnnnnnnnnnnnnnnnnnnnnnnnnnnnnnnnnnnnnnnnnnnngc

SEQ ID NO: 17357 - DNA, 415 bp, Arabidopsis thaliana
  unsure at all n locations
  Clone ID: LIB35-031-Q1-E1-F5
aagacgacaggagggggcattgaatgagtctcttcaagatttacttgatggtattcaggaggatttctatactgttgttgactgggcatataaaatagaccccctacggtgtatttcaatgcatggtataactgaacgttatctatctggtcagaaagctgatgctgcaggatttgttcgccttttgcttggagatctggagtcgagagtttctatgcaattcagccgttttgtggatgaagcttgtcaccaaattgaaagaaatgaacgtaatgtaagacagatgggtgtcttgccatatattccaagatttgcancacttgctactcgtatggaacaatacatacaagggcaatctagagatttggttgatcaggcatacacaaaatttgtgagcataatgtttgtgaccctc

SEQ ID NO: 17358 - DNA, 413 bp, Arabidopsis thaliana
  unsure at all n locations
  Clone ID: LIB35-028-Q1-E1-D4
acaaagaacaaaacttccgtatcctggagagtaaattcctttatggctacgaatgggttaatggcgtcgtccagtgtgtttcttcatcgcccgcgtatcgcatttgcttctagaacgaatcagactgtaggaaaatacggtaaaggccgtgttagtttcatgggcattgggacacgtcgtcttccggtggttttatccatgacggcgatggcggattccggtgaggaggccgtgaaatctgttttgcctggaaatggcatatccatcatggtgaatggatgtagtggcaaaatggggaaagctgtaattaaagcagcagactctgcaggagtaaatattgttcccatatcgtttggatctgctggtgaggatggtcagagagttgangtctgtggaaaggagattactgtgca

SEQ ID NO: 17359 - DNA, 429 bp, Arabidopsis thaliana
  unsure at all n locations
  Clone ID: LIB35-028-Q1-E1-E1
ggctgcgagaagacgacagaagggcaaactatgggagagcatcaggctaaaaaacgaaaaagccatcactgaaggaggaaccattggttctcgttacaaagaagctgacaagtcctgcaaagtgatgtcgggtagattcttccctgaaaatgcctgcctcaaaggtacagccattattactgctgtggttctagctgctgtagctgtactagcttccaacctgtacgctgaagaagatggtggactcattggttctgcacctatacttcaatgcaaacacctcagctttgaagaactaagagagatataccattgtccttgctttccttttgctaagagtttgtgaatatattgagatatgtcgtcaatcttgttgttgggtatttgttcactcaaatagacgtttgacaaaaaaaaagtatatttang

SEQ ID NO: 17360 - DNA, 440 bp, Arabidopsis thaliana
  unsure at all n locations
  Clone ID: LIB35-028-Q1-E1-E12
gcgtccgtacggctgcgagaagacgacagaagggggaaggaatcaaaacggtgcgttccggttacggagcacacacagataggataggaaaccctaaaagtgcttcttcttcttcgtcttcttcagttttaggttacgatcgaagcaaaancggcgcatctgaatcccaaacgantgacnataacgatcnattcgcagcanaaaacgagcaaattcagatggggggaaatggacgaagacgaanatctggatttcttgctccctcccaagcaggtgattggtccagatgagaatggtttgaagacgacgatcgagtacaaattcaacgatnaagaaaataaggttaagataacgactaggacacgtgtccgcaagctaacttctgctcgactcaacaaacganccatggagaagangaactggcctaanttcggagacgc

SEQ ID NO: 17361 - DNA, 448 bp, Arabidopsis thaliana
  unsure at all n locations
  Clone ID: LIB35-028-Q1-E1-D11
gcgtccgtacggctgcgagaagacgacagaagggggaagacataaaaagtaattagtgagaaaattaagaaaaacaaagtctattccatacgaataagagcctcaggttaattttttaaaagatgggttattggaagtcgaangttgttccaaggatgaagaaatttgttcgaagaaagagtccancaaaaaaaggaatttgttganggaaggagaaacccacgagaggtgggantccttggaggaaggcctccttgaaaaccgaagaaccggccaaggaaaggngaaactaaaccggaggaaataattgcanccggcnaaaaagattagaattattnaagagaagaaagaaaggctaaaccntggaggttccggcccccatctgcggnggaaaaaacccaccgtaaagagnggaaaaacgcccggtggaaaaaaaccctcttggaaa

SEQ ID NO: 17362 - DNA, 425 bp, Arabidopsis thaliana
  unsure at all n locations
  Clone ID: LIB35-028-Q1-E1-E7
aagacgacagaaggggagaggaagaaaactttggcagagagcggagcatcacacatattttggcctctccttcacgatattcgaagaagtctcctcctccttctccaacgaatcccagatcaggcggcaagtaggcgaatccttacgaagaattctaacttcatcatcaacgatagatactctagtttgattttcaaagtagtagtgtaaaggaatcagaaatggcggtgggagagaaggagcacgaaggaactgtggttgaaagcggcggcgagaagaatgattccgccgttgtactctctgcttccggcgagaagaagacgacgaagcgtaaaggtttgttctcgcgtctttggaatgcgatatttanggttagaggtgatgatttcgagaagagacttaaaaatatctcaaaggaagaagcg

SEQ ID NO: 17363 - DNA, 411 bp, Arabidopsis thaliana
  Clone ID: LIB35-028-Q1-E1-E8
aaaagaaaaatggatatgtcgcttgcgttatcgacggcaccaatgagtaggacgattatctctgccacgaggcggtcccaagtttcacaacctaaagctaagaaagtcaagccggcgaataagcggccaacgatgtcgacaagcggtttctccggcggaacgacaaaggagttgacttggaagtgcgtagaaggttgtggagcttgctgtaagattgcaaaggacttttcctttgcaacacctgacgaaatcttcgacaaccctgatgatgttgagctgtatcgaagcatgatcggagatgatggatggtgtctaaactacgacaaagctacacgcaaatgctctatttatgctgatcgtccatatttttgtcgggttgagccagaggttttcaagtcactctacgggatt

SEQ ID NO: 17364 - DNA, 429 bp, Arabidopsis thaliana
  unsure at all n locations
  Clone ID: LIB35-028-Q1-E1-E9
agaagggattctataagaagcactatggagaagaggacatgaaggatcttatagaggacctggagtggaataaagtaaatgatttcaaatggaggaacttatatgagttgaaggttatagctgtgcaacaaaaggagaaggaacttggtggtcgactgaaagaacgttacaaggacgaaaatgaaaggaaacaaagtcgacaaactaaggtctgctcgaaagctcctccaagcaaaagaccattttggggtaatagtgcatcaggttacaatcttgggcatgtgaagagcaacatcatgaagaaggcaaaaatagatctgttgaagagtcaagaagtgaaaaatcttactgcgattaaaaggaacaccattcagaagagtttcagtattctactccaaagaaaactgggcttatctgcgaantcgcctt

SEQ ID NO: 17365 - DNA, 456 bp, Arabidopsis thaliana
  Clone ID: LIB35-028-Q1-E1-F11
gcgtccgtacggctgcgagaagacgacagaaggggagagaagcaaagagatgtcttttgaggagtttacgccgttaaacgagaagtctcttgtagactacatcaagtcaacacctgctctctcttccaagatcggagccgacaagtccgatgatgatttggttatcaaagaagttggagatggcaatctcaatttcgttttcatcgttgttggatcctctggttctcttgtcatcaaacaggctcttccatatattcgctgtatcggtgaatcatggccaatgacgaaagaaagagcttattttgaagcaacaactttgagaaagcatggaaatttatcacctgatcatattcctgaagtctaccattttgacagaacaatggcgttgattggaatgagataccttgagcctcctcatatcattctccgcaaaaggactcaattgctggggattga

SEQ ID NO: 17366 - DNA, 452 bp, Arabidopsis thaliana
  unsure at all n locations
  Clone ID: LIB35-028-Q1-E1-F3
agaagacgacagaaggggactgaatatgttgtgactcgttggtaccgagccccagagcttctcctctgttgtgacaactatggaacatccattgatgtttggtctgttggttgcattttcgccgagcttcttggtaggaagccgatattccaaggaacggaatgtcttaaccagctgaagctcattgtcaacattctcggaagccaaagagaagaagatcttgagttcatagataacccgaaagctaaaagatacattagatcacttccgtactcacctgggatgtctttatccagactttacccgggcgctcatgttttggccatcgaccttctgcagaaaatgcttgtttttgatccgtcaaagaggattagtgtctctgaagcactccagcatccatacatggcgcctctatatgacccgaatgcaaancctcctgctcaaagttccta

SEQ ID NO: 17367 - DNA, 204 bp, Arabidopsis thaliana
  unsure at all n locations
  Clone ID: LIB35-028-Q1-E1-F7
ggctgcgagaagacgacagaagggtacggctgcgagaagacgacagaagggtacggctgcgagaagacgacagaagggtacggctgcgagaagacgacagaagggtacggctgcgagaagacgacagaagggtacggctgcgnnnnnnnnnnnnnnnnnnnnnnnnnnnnnnnnnnnnnnnnnnnnnnnnnnnnnnnngcggcc

SEQ ID NO: 17368 - DNA, 411 bp, Arabidopsis thaliana
  unsure at all n locations
  Clone ID: LIB35-028-Q1-E1-G10
agaattgtttacattggaatgcctcttgtgccggcagtgactgagctagttgtcgctgagctaatgtatcttcagtggctggatcccaaggaacccatttacatttacatcaactccacagggaccactcgtgatgatggagagacggttggaatggaatcagaagggtttgcgatctatgactctttgatgcaacttaaaaacgaggtacatacantatgtgtgggagcagccataggtcaggcctgtctattactttctgcgggaaccaagggtaaacggtttatgatgcctcatgccaaagcgatgattcagcaaccacgtgtaccttcctctgggttgatgcctgccantgatgtcctgattccggccaaagaagtcattacaaatagggatatacntgtggaacta

SEQ ID NO: 17369 - DNA, 416 bp, Arabidopsis thaliana
  unsure at all n locations
  Clone ID: LIB35-028-Q1-E1-G11
ggctgcgagaagacgacagaaggatacggctgcgagaagacgacagaagggtacggctgcgagaagacgacagaagggtacggccgcgagaagacgacagaagggggtgaatctctcatcgttctctcaaatttcgtgtttttgtaaccggacggagaacctttcacgatgtctgcaaaccaggaggaagacaagaagccaggagacggaggagttcacatcaatctcaaagtcaagggacaggatggaaacgaagttttctttangatnaagagaagcactcagctcaagaagctgatgaatgcttactgtgaccggcaatctgtggacatgaactccattgctttcctgtttgatgggcgtctcctcgtgctgaacaaactcccgattaacctnacatggaagatngtattaag

SEQ ID NO: 17370 - DNA, 302 bp, Arabidopsis thaliana
  unsure at all n locations
  Clone ID: LIB35-028-Q1-E1-G2
ctggttcgccttgccgtaccgcgtccgggaattcccnggtcgacccacgcgtccgtacggctgcgagaagacgacaaaagggtacggctgcgagaagacgacagaagggtacggctgcgagaagacgacagaagggtacggctgcgagaagacgacagaagggtacggctgcgagaagacgacagaagggtacggctgcgagagacgacagaaggggttcnnnnnnnnnnnnnnnnnnnnnnnnnnnnnnnnnnnnnnnnnnnnnnnnnnnnnnnnnnnnnnnnnnnnnnnnnnnngcggcc

SEQ ID NO: 17371 - DNA, 455 bp, Arabidopsis thaliana
  Clone ID: LIB35-028-Q1-E1-G5
gcgtccgtacggctgcgagaagacgacagaaggggattggcgacatttttgggaaatctagagactaataatcaatttcgtcaaaagatcaaatcttgctaaattttcttctgctcgtttgattttccgaatcgttggtttcgataagtgaagaaaagatggggaatttgttcgtgaagaaaccacagatcacggaggttgatcgagcgattctctctctcaaaacccaaagacgcaagcttggtcaatatcagcagaagcttgagaaagtaattgaagcggaaaagcaagctgcaagagacttaatccgtgaaaagcgaaaggacagagctttgttagcattgaggaagaaacgaactcaagaagagttattgaagcaagtggatcaatgggtcatcaatgttgaacaacaattaacagatattgaacttacgagcaaacaaaaggcagtgttt

SEQ ID NO: 17372 - DNA, 415 bp, Arabidopsis thaliana
  unsure at all n locations
  Clone ID: LIB35-028-Q1-E1-H10
cttcgtcatcgacctacgctgcgattatctctccctctcaaaattccttatctcgtcgattaatttctctcagatcatgttgactganactccatttaggccacgagagaagcttctggagaaacagagattgttccagagcatccaaaggcacacttacttgaaaggaccaatggacaagatcacttctgttgctantcctantgccttggctgcaagttctctctacatgattggnacaggaatctacaacatgtcnaatggaatcggcaanaangaataagcagcttcntgatttttccntcctttttatatgcttttggtttctcaatgtatcantcactggncatatgcagtagcaagactaanggttgcactggtcnttttcctgaaactgtttattccgtccttgcna

SEQ ID NO: 17373 - DNA, 421 bp, Arabidopsis thaliana
  unsure at all n locations
  Clone ID: LIB35-028-Q1-E1-H11
tcgattgctcttcttcgtagtcgcctttgaattcgcagagtgagaagcaatgagggtgagatcatctgtgaagaagatgtgtgagttttgtaaaacagtgaaacgtcgtggacgtgtgtatgttanangcncttccaatcctaagcacaancaaagacaagggttcagttcctttgcttatgaaggaattacaccttcccctttgtttgctgagccgattgctagtcagganttggtgaggctgcctggtcagggggtatcaaccggactgggcatcacttttacacaaaaggccntatgccaacagcgtatttcngatgngaggtctggtcttgcatccattctcttcaaacagggaaattagggatgtcaacatttccctttttatccctcanatttgtaccccttttcttccacaacc

SEQ ID NO: 17374 - DNA, 423 bp, Arabidopsis thaliana
  unsure at all n locations
  Clone ID: LIB35-027-Q1-E1-F9
ggctgcgagaagacgacagaagggtacggctgcgnnnnnnnnnnnnnnnnnnnnnnnnnnnnnnnnnnnnnnnnnnnnnnnnnnnnnnnnnnnnnnnnnnnnnnnnnnnnngagctttacaatttctctctacagagatcgaagatatggaaggcaaggaagaagacgttagagttggagctaacaagttcccggagagacaaccaatcggaacatcggctcagagtgacaaggactacaangaaccaccaccagctccgtttttcgaacctggtgagctttcttcatggtctttttggananctgggatcgctganttcancgctacttttctctttctccacatcaactgtcttgactgttatgggagttanaaggtcaccgnagattgtgccttcctccgggatccaaggaatcncttgg

SEQ ID NO: 17375 - DNA, 296 bp, Arabidopsis thaliana
  unsure at all n locations
  Clone ID: LIB35-027-Q1-E1-G2
ngtnnnnnnnnnnnnnnnnnnnnnnnnnnnnnnnnnnnnnnnnnnnnnnnnnnnnnncggccgcncaaaaggatccaaagcttacntacgcgtgcatgcnacgtcatagctcttctanagtgtcacctaaattcaattcactggccgtcgttttacaacgtcgtgactgggaaaaccctggcgttacccaacttaatcnccttgcagcacatccccctttcgccagctggcgtaatancnaanaggcccgcaccgatcgcccttcccaacagttgcgcancctgaatggcgaatgg

SEQ ID NO: 17376 - DNA, 510 bp, Arabidopsis thaliana
  unsure at all n locations
  Clone ID: LIB35-027-Q1-E1-G3
tangctccggaatcccaggtcgacccacgcgtccgtacggctgcgagaagacaacagaagggggtggaccaagatcgtccattgaagtgaacagtcagcatcgttttgcttgcttgtgcgtttctctcgaactctctccatggctgttgcgctccaattcagccgattatgcgttcgaccggatactttcgtgcgggagaatcatctctctggatccggatctctccgccgccggaaagctttatcagtccggtgctcgtctggcgatgagaacgctccttcgccatcggtggtgatggactccgatttcgacgccaaagtgttccgtaagaacttgacgangaagcgataattacaatccgcaaanggggtcggtcaanaaggagggngacacccaagntcatgaantcgaggagtacaccanttgagatatttgggagacaactganagagaaaatgggtagaacttnattcctgggggaaaatgttaaccggtgaaaactccnctaa

SEQ ID NO: 17377 - DNA, 436 bp, Arabidopsis thaliana
  unsure at all n locations
  Clone ID: LIB35-027-Q1-E1-G8
aagacgacagaagggggacacacacaaaaaacccataaaaaaatatggcaaatatctccagtattcacattctcttcctcgtgttcatcacaagcggcattgctgttatggccacagacttcactctaaggaacaattgccctaccaccgtctgggccggaactctcgccggtcaaggacccaagctcggcgatggaggatttgaattgactccaggtgcttcccgacagctcacggctcctgcaggatggtcaggccggttctgggctcgtacaggctgcaactttgacgcctccggaaacggtagatgtgtaaccggagactgtggcggtctaagatgtaacggcggcggagttcctcccgtcactcctggctgaattcactctaagtagggcgatggcggnaaaagattctacgatgtnaagcctcgtagatg

SEQ ID NO: 17378 - DNA, 470 bp, Arabidopsis thaliana
  unsure at all n locations
  Clone ID: LIB35-027-Q1-E1-F7
gcgtccgtacggctgcgagaagacgacagaagggcataaaaaaaaaaaaaaacacaaaaaagtttcaatggccgcctcaacaatggctctctcctcccctgctttcgccggaaaggctgtgaacctttcccctgcggcatcagaagtccttggaagcggccgtgtgacaatgaggaagactgttgccaagccaaagggtccatcaggcagcccatggtacggatccgaccgagtcaagtacttgggtccattctctggcgagtcacccagctaccttaccggagagttccctggagactacggatgggacacagctgggtctatccgctgaccccgagacattcgcaaaggaaccgtgaagctaaaaagttatccacagcangtggggccatgcctccggagccctaaggctgcgtcttccctgaacctttgggcaaggaacggantcaagtttgggaaaaggaantttt

SEQ ID NO: 17379 - DNA, 470 bp, Arabidopsis thaliana
  unsure at all n locations
  Clone ID: LIB35-027-Q1-E1-H4
gcgtccgtacggctgcgagaagacgacagaagggggctcacaaatgtttgaaagaagaaaaaaccctaaacccccaaaatttgcttcgagaagaaaatgaatggtgtctctcgtcatcttcgagcttcttcacttctttcattaattcgcagctatggtggaatcaattcggtctgtcgattttcgtctcaatctgatggcttctctggagggagattcagagagcaagtgccagtttctggagagtctgcaaataattcaggcttatcaaacacgggaagaatcggttcctctccggagcctaatccttcgactttgagaacttttggtgatatgaaagcaggcttgttaaacagaaggagtcaatggtttctcggctcctaatgctcctcctaccttcaaaaagttcactgagattcaagattacaaaactctctacctgattagttcggtcaaacnaatccaagctt

SEQ ID NO: 17380 - DNA, 415 bp, Arabidopsis thaliana
  unsure at all n locations
  Clone ID: LIB35-028-Q1-E1-A12
ggctgcgagaagacgacaaaagggtacggctgcggagaagacaacagaagggtacggctgcgagaagacgacagaagggccaacatatggatatgcacngaatgtacagtggcgtctctctcgactctttcctaaagttcatgactgtacaatctttgacagaggaaggtctgagaaacctcggcccttatgtancaactatggntgaaatcgaaggtttagatgcacacaagagagccgttnctctcanactcaaggatatcnaagccaaacagcttgcanaatccaattgngatttatattcagacaanagaggcaaaaattctttttgtaatgtatgaacatatttggtttcctgagatgggatnacaatnanataagagatgttggaaaactcttaccatattngcagctt

SEQ ID NO: 17381 - DNA, 306 bp, Arabidopsis thaliana
  unsure at all n locations
  Clone ID: LIB35-028-Q1-E1-A2
ggctgcgagaagacgacagaagggtacggctgcgagaagacgacagaagggtacggctgcgagaagacgacagaagggtacggctgcgagaagacgacagaagggtacggctgcgagaagacgacagaagggtacggctgcgagaagacgacagaagggtacggctgcgagaagacgacagaagggtacggctgcgagaagacgacagaagggctccnnnnnnnnnnnnnnnnnnnnnnnnnnnnnnnnnnnnnnnnnnnnnnnnnnnnnnnnnnnnnnnnnnnnnnnnnnnnnnnnnnnnncggc

SEQ ID NO: 17382 - DNA, 504 bp, Arabidopsis thaliana
  unsure at all n locations
  Clone ID: LIB35-028-Q1-E1-A3
taactggtaccctgnacgtacnnntncgcgaggtcgacccacgcgtccgtacggctgcgagaagacgacagaaggggaagaaagatgtaaggagagcaactggtggtagtagtgacaagacaatgaatagcaatagcagtaccaacgaagaaagtttagtcaacggtgaagctacaatcagctagtggaatgcaaacaagatcactgttcatatctgtgtctcgtgagactcattacgaaaggaggagagtttcttccaacggaaccacagtttcttgaagctgtgcatatatgttggcaagtctggtgtggaggaggataacatttttgaagacgtcatatgttgggagattctcagacatttcatcagttctttctgttgtcttctctcttgcaaactcattagcccgtttaggttacttgatatattaatgtttttgactaaattttaattgggatagatgatttttcctcagcttgtcaaantttcccaaattttgttaa

SEQ ID NO: 17383 - DNA, 396 bp, Arabidopsis thaliana
  unsure at all n locations
  Clone ID: LIB35-028-Q1-E1-A7
gaaagaggagtgtgaagccattaggaaacttatctctgcgcagccaccgaggtcagagacgcagaaggttatacatgaattgaagaaggagattgcagaactcgaggctgagaatacagcaagttggagacttcttgaactaaggaagaagcagtttgcattgttgttgcatgtggtggatgagttgcaggagacaatggaggatgaacagaagagtatggtggaagaaatgcggaggaacattaccgctgatggcgctgaagccatgtccatcgattagctcctaatcttagcaactttgtcttcctcttgaatgctaaagaaacaaacctttcattgataagaagaatctgttttataaaaanaancnntnggaancaaaanaaaaaaancggc

SEQ ID NO: 17384 - DNA, 417 bp, Arabidopsis thaliana
  unsure at all n locations
  Clone ID: LIB35-028-Q1-E1-B12
aagacgacagaaggggattgttgcgaatttctgtgagattgagaatgcaggcggaggagataatatgccgtgtttcagacgaagagatcatcgagaattacctgaggccaaagataaacggtgaaacatcttcaatcccgagatatgttgtggaattggcagaggagctgtacactgtagagccttggctgcttcctcgacaagcagctccaattctcaaccctggcgagtggttctactttgggaaacgcaatcgaaagtatagtaacttggaaggtgttcattgcganggatcgtggatactcnaagacggttgcatcgcagtcctgtccaaggagacgggtgaggaaattggtggaacgacgagatttaagtattactataagaacaanggggataaagagatctctgaagatg

SEQ ID NO: 17385 - DNA, 431 bp, Arabidopsis thaliana
  unsure at all n locations
  Clone ID: LIB35-028-Q1-E1-B2
agaagggggaggctgagataacagacgcggcgaagaggtcccttccgattaaaagtcgcaagcattcaacgatggcttccatcacgaattatgtccgatacatggctcacaagctcgagtactctctcactctcagccttaagaaacatactagagagaagctcagtgaccgggaactctttggtgtagtcatgaagaatctattctatggaagaataagctacttacactcggacaaaggaaaagagatggccccaaccatgggaacaaatgaaagcacgctacttgtccgtaagctaccagttgttgatacaaggtacattttcgtaggggatgctgttgtcttgaaggacccgaatgaaacaaataagtatatagtcagaagactagcagccttaganggatctgaaatggtatcaagtgatgagaaa

SEQ ID NO: 17386 - DNA, 429 bp, Arabidopsis thaliana
  unsure at all n locations
  Clone ID: LIB35-028-Q1-E1-B7
agtanggggatggagaaaattatggagtatctgcaattgagcgatgaggtggttgacgacggtgaggcaccgcgagttgaagaatttttaggtgaagggaaaagcttctacgagaattttaagtctcagaggaatccgagtcaaccgagtcgaaccgggtttcatttcctgctctttcaaggttcctcttcgtttgacggacagagacaagaatttagcaaatggtgcgattgcaaatcttgtggatgaagttggtggagcacttgtacatggcgaangcttacctatgagtgtttcagtggacatgtctattgcattcctttcaaaagctaagcttggtgaagagttggagataacgtcgagattgttaggagagagangaggttataaaggaacaatcgttgtatcagaaacaagatgaccggggaa

SEQ ID NO: 17387 - DNA, 357 bp, Arabidopsis thaliana
  unsure at all n locations
  Clone ID: LIB35-028-Q1-E1-B8
ggctgcgagaagacgacagaagggtacggctgcgagaagacgacagaagggtacggctgcgagaagacgacagaagggtacggctgcgagaagacgacagaagggtacggctgcgagaagacgacagaagggagacaaaggtgttgttttggtttttcccaagcaaaactcaaggaggaggtgactaatatgattatataactttgtatcttcttcttgttgttatacataaatgctgtttttttactctttgtaatttcattatcgaattgttgggaagcctatcaataaattgtttgaactgtttgtattttctgagttnnnnnnnnnnnnnnnnnnnnnnnnnnnnnngcggcc

SEQ ID NO: 17388 - DNA, 349 bp, Arabidopsis thaliana
  unsure at all n locations
  Clone ID: LIB35-028-Q1-E1-C11
ggctgcaagaagacgacagaagggtacggctgcgagaagacgacagaagggtacggctgcgagaagacgacagaagggtacggctgcgagaagacgacagaagggtacggctgcgagaagacgacagaagggtacggctgcgagaagacgacagaagggtacggctgcgagaagacgacagaagggtacggctgcgagaagacgacagaagggtacggctgcgagaagacgacagaagggtacggctgcgaagaagacgacagaagggtacggctgcgagaagacgacagaanggtacggctgcnagaagacgacagaanggtacggctgccagaagacgacagaangg

SEQ ID NO: 17389 - DNA, 452 bp, Arabidopsis thaliana
  unsure at all n locations
  Clone ID: LIB35-028-Q1-E1-C12
gcgtccgtacggcgaagaagacgacagaaggggaggaaccatgaaggttgactcgtctgcgtctccggaggtcgtatccgatctcccaccatcttccccaaagggctcacctgatcgccatgacccttccacttcttctccgagccccagtcgtggtggtgacaatcggtctgaagtcatatccaagagtatctgaatgtgacgaggaggggaaggtggaaatggtgggcgaaggggtagttaaaaaaagcttaaaggaagcatgggtgaatctgacttcatttgtgaagaggcaaagcgggacaaggcangttatagtattagcgtttgcagtaatcttactgatgcaggtgacgatagtggtgctactgaaaaaaggangaagggggcaagtggagtatcatgagaagtacgacgaatacagtgtaaacggggaaactttggggtggtta

SEQ ID NO: 17390 - DNA, 419 bp, Arabidopsis thaliana
  Clone ID: LIB35-027-Q1-E1-B9
gcccacgcgtccgtacggctgcgaagacgacagaagggtacggctgcgagaagacgacagaaggggatcacatcctcacacacaaaaataaatcatcacaagaccagagttaaaagagagacatgtcgacttcattcacaatgatcggcggtgaaggtcccaacagttaccgggaacattcgaaataccagggagcactggttatagctgcaaaggaaaagatcaatgaagccatctccacgaaactcgatatcgactttacttcaaatcttgttaacatagctgattttggttgttcctctggaccgaacactttcaccgcggtacaaaccttaattgatgctgtggaaaacaagtataagaaagaaagtaatattgagggaatcgagttccaagttttctcatgatcctcaaacaac

SEQ ID NO: 17391 - DNA, 414 bp, Arabidopsis thaliana
  unsure at all n locations
  Clone ID: LIB35-027-Q1-E1-C3
tgttgttttcttatagaaggattttgatttcttctgcaaaattcgatcgatagtgacgagaaagatcctaagatggcgaccgcaagcgagagttcttcatctaagagatggcttccacttgaatctaacccagatgttatgaatcagtatctctggggacttggtcttgcccctgatgaagcagagtgcaatgatgtgtatgggttntacgatgaacttctnnagatgggtccananncngttcttgccggtgctctcctttacccatcacacaaagatggtgaanaagangaatccnccaacacaaagggngnttttggganaaggtggcananccgnntaaangtttacctttttgaaaacaaaactggtgggtaaatccttgttggaaccaattggggcntccctccatcc

SEQ ID NO: 17392 - DNA, 428 bp, Arabidopsis thaliana
  unsure at all n locations
  Clone ID: LIB35-027-Q1-E1-B8
ggctgcgagaagacgacagaagggtacggctgcgagaagacgacagaagggtacggctgcgagaagacgacaggagggcacggctgcgagaagacgacagaagggtacggctgcgagaagacgacagaaggggggctgtgttggnagaacttggtaacaagtcttangtctcacttgtttggcttatggaaacccacacatgcatgagcagcctctgangtttaccttatgtcttacatgatcattgttgaataattcattgggagtttatgacaatgggagctttcaaatatctgattattttgtattgatacatgcacaatgctagatttgtatccatnagatagttgcataaaccaatatactataccctcggatcttancttattttcattgatatccttgttgttttgtgctgtaaacatatc

SEQ ID NO: 17393 - DNA, 418 bp, Arabidopsis thaliana
  unsure at all n locations
  Clone ID: LIB35-027-Q1-E1-D10
acaacaacaacaaacaagagctcaaacacttcataactaaacatcctttaaagcctcttcaaaaactcaatcatgtcaagcaactgcggaagctgcgactatgctgacaagacccagtgcgtaaagaagggaaccagctacaccttcgacatcgtcgagactcaggagaagctacaaggaggccatgatcatgggacgttggtgccgaggagaacaacgcaaattgcaantgcaantccggccctcttgcanctncgttcaacngcattgctggcccaattaatnaagcttccttaancnanaantgtnatatgaataaaagttgaanntggggccnaccatttagcccaantcccccctattanaaaccnccccaanaanggggtnatttantggggtaggcccttnctttccttcc

SEQ ID NO: 17394 - DNA, 434 bp, Arabidopsis thaliana
  unsure at all n locations
  Clone ID: LIB35-027-Q1-E1-D2
gagaagacgacagaaggggttcacagagatttgaaaccggaaaacattcttatggccacaatgtcttcttcgtctcctatcaaattggctgattttggactggcaacctatataaagcctggcgaaaagctgagcggaacagttggtagtccgttttatatagccccggaagtgttagcagggggtataaccaagctgctgatggctgccgatttgagattttctgcagagccatgggacaatataacttcatacgccaaggatttgattcgcgggatgctttgtgtggatccttcccaaaggttatcagctgacgaagttctagctcactcttggatggagcagttatctgaatcaggtcaagaacaatatgatnaaggatgggtttggttgtgaaggattggagaatggggaatgtcctttctcaaacaatg

SEQ ID NO: 17395 - DNA, 436 bp, Arabidopsis thaliana
  unsure at all n locations
  Clone ID: LIB35-027-Q1-E1-D3
gcgtccgtacggctgcgagaagacgacagaaggggaggtatggaaagctttacttgaaactcgcaaagagctacatagaaaaaggttcagactatgctagcaaagaaacggagaggcttggacgggtgcttgggaagtcgataagtccagtgaaagctgatgaactcactctcaagagaaatatcctaaccacgttcgttgcttcttcttaaaagtcatatagcttgaagctaagagaataggagtcgagagagtttataactgatactgttttgagattttatgtttgtcaagatcaagaacgtctgtggttatttctggttagttctgaaactcttttgaacccaagtttatctgtctctggtgaacaagcgaccacgataatcataaacttcatccgcgttaaaaaaaaaggtcaataatgggccangctcct

SEQ ID NO: 17396 - DNA, 419 bp, Arabidopsis thaliana
  Clone ID: LIB35-027-Q1-E1-D5
agacgacagaaggggaatgatgaagatcctctttacgccgacgtacctaaacctccgaaggataaatcggagaggaaaccgtatccgactccgatgaaggagtttgattcgtcgtgcgaaagaggagaaacaactgagaaaattacaaccatgtcgagttctcgaagatccaccggataatggtttacttgtgccggaacttgtcgacgtagctcactgtgttcaccgatgccgtaacatgttgctctctggcctctctaaaatcattcatcatgttcctgttcatcgttgcagattgtgcgctgaggttcatattggcaagcaaggtcatgaaatcaggacttgcactggtcccgggagtggttcaagaagtgcgactcatgtttggaaaagaggaagagtgaattgatgttgtgttg

SEQ ID NO: 17397 - DNA, 173 bp, Arabidopsis thaliana
  unsure at all n locations
  Clone ID: LIB35-027-Q1-E1-D6
ggctgcgagaagacgacagaagggtacggctgcgagaagacgacagaagggtacggctgcgagaagacgacagaagggtacggctgcgagaagacgacagaaggatacggctgcgagaagacgacagaagggtctgnnnnnnnnnnnnnnnnnnnnnnnnnnnnnnngcggcc

SEQ ID NO: 17398 - DNA, 416 bp, Arabidopsis thaliana
  unsure at all n locations
  Clone ID: LIB35-027-Q1-E1-D7
gaagggggagaaaggcaaatcggagacgatgagcgaaaccgaagcaaccggcgttaccgatgattcggctccagcgattgagactgaaactgtttctgatgcgatggagcatacagcgatcggagtggttgaatcggtggaaggagccatagaaggagcagagaaatgggtgggtgatttgcaacggacggtgaaggaatcgaaggataccgcaatgcgttctgctcgttccctccgtgaaaattctacctctcagttccgctccatacaggatttcattccacatgctttgactcagtataagacctatgagaatgctttcttcagtaaagttacagacgaattgatatacgcaaaagaacatccggctgctgctantgggattggtgtcgctgctatctcgttctgatccaagg

SEQ ID NO: 17399 - DNA, 649 bp, Arabidopsis thaliana
  unsure at all n locations
  Clone ID: LIB35-027-Q1-E1-E12
tgntctaccggcccggaaatcccggatcgacccacgcgtccgtacggctgcganaagacgacagaagggcagtcnnnnnnnnnnnnnnnnnnnnnnnnnnnnnngcggccgctctagaggatccaagcttacgtacgcgtgcatgcgacgtcatagctcttctanagtgtcacctaaattcaattcactggccgtcgttttacaacgtcgtgactgggaaaaccctggcgttacccaacttaatcgccttgcagcacatccccctttcgccagctggcgtaatagcgaagaaggcccgcaaccgattcgcccctttccaaacaagtttgccaagcctngaaatgggcgaaatggggaacgccgcccctggttaaacggggcgccaatttaannccnccgggcggggggttngtntggttgggtttaacgncccccaaancggtttaacccggncttaaacaancttttgccccaaagcngccccccttaaaaccggcccccggggntccccctttttccngccctttttccctttnccccctttccccctttttccncgggcccaaaagggtttttccncccccgggggnttttttncccccccggttnaaaaaaggnntncccnaaaaaaattccgggggggggggcc

SEQ ID NO: 17400 - DNA, 460 bp, Arabidopsis thaliana
  unsure at all n locations
  Clone ID: LIB35-027-Q1-E1-E2
gcgtccgtacggctgcgagaagacgacagaaggggatcaccaaaaaagaaagcaatttgtcttcaaaacatatttctctctctaaaacctctttttcataaaaggttgcgtcatctatacgaatccatacgtctctttgcttttctccgatcggtcttcttttctcatcgccggaacgctttggtaatgtttctcatttctccgatcattattgttgtttcgccgttgagctgattatttcgtgttggtatgtataaacaagccgatcgttgtttccttttttctcttgtgattgtgtgatgatggattgtttctttttttcggtttaatccggtttattcccggttttgctgctacatcggtgacttttcccacaatcttcgggtatgatcgcgatcatgtccgttaaccggagtcggttctgaaanttcagacttcgaatttgtccnctttcacgtag

SEQ ID NO: 17401 - DNA, 440 bp, Arabidopsis thaliana
  Clone ID: LIB35-027-Q1-E1-E4
aagacgacagaagggggaactcatgccaagttagaattgagatttggagtttcgacaaagcttgagagagatcgatgtcgtcaaagatggtgaagtcttcagaaatcgtcggaaaacttaatctcagggcacaccaagaaggaggctttttcgctgaaactttcaaagattcttctgttttcctctccacctctcagctccctccaacctttaaggtggacagagctgtgagcacaagtatctacttcttgcttccatctgtgagcgtttctcgtcttcatcgcataccaatggctgaaacctggcacttttatttgggtgaaccccttactgtagtggaactctacgatgatgggaagttgaaattcacatgtcttggtcctgacttgttttgaaaggtgattagaagcctcaagtacacggtccctccaaaacgtctg

SEQ ID NO: 17402 - DNA, 438 bp, Arabidopsis thaliana
  Clone ID: LIB35-027-Q1-E1-F2
agaaggggaggtccagaaagttgggtctctaagcagctctgatattttccctgctggtgtgggatggtttatggactttgtgtcaggacgacataagacacttcacaaagttttcgtcgaggttgatactttgctaaatcatgtaattgatggtcacttgaagaatcctgaagacaaaacaaatcaagatcgccctgatatcatcgactcgatcttagagactatttataaacaagaacaagatgaatctttcaaactcaccattgatcatctcaaaggaattatccaaaatatatatcttgctggagtagacacaagtgccatcaccatgatttgggcaatggcagagcttgttaagaacccacgggtaatgaagaaagctcaagaagagatccgaacatgcattggatcaaacagaaggagagaatcgaagaagaa

SEQ ID NO: 17403 - DNA, 433 bp, Arabidopsis thaliana
  unsure at all n locations
  Clone ID: LIB35-027-Q1-E1-F4
ggctgcgagaagacgacagaagggggccacacactcactcactcgtagtttcgacgctatctctagaacattccgataaaccacannnnnnnnnnnnnnnnnnnnnnnnnnnnnnnnnnnnnnnnnnnnnnnnnnnnnnnncttacgtcgacgatcacttaatgtgcgatgttgcaggcaaccgcctcaccgccgccgcaattctcggccaagacggtagcgtctgggctcagagcaacaattttcctcaggtgaagcctgaggaaattcagggcatcaaagacgattttactacacctggaacacttgccccaacaggattgttccttggtggtaacaagtacatggtaatccaaggagagcctaatgccgtcattcgaggaaagaagggagctggtggtgttacatcaagaagaccaccttagctttggta

SEQ ID NO: 17404 - DNA, 463 bp, Arabidopsis thaliana
  unsure at all n locations
  Clone ID: LIB35-027-Q1-E1-F6
gcgtccgtacggctgcgagaagacnacagaagggtacngctgcnanaagacgacagaagggtacggctgcgagaagacgacagaagggtacggctgcgagaagacgacagaagggtacggctgcganaagacgacagaagggtacggctgcgagaanacgacagaagggtacggctgcgagaagacgacagaagggtacggctgcgagaanacgacanaagggtacggctgcganaagacgacagaagggtacggctgcgagaagacgacagaanggtacggctgcganaanacnacanaagggtacggctgcnagaagacgacagaagggtacggctgcgagaagacgacagaagggtacngctgcganaagacgacanaagggcggccgggaaactgctantggttggttaggtctatcgatttagccggtttagttcggttaaccgttggcgttcataac

SEQ ID NO: 17405 - DNA, 427 bp, Arabidopsis thaliana
  Clone ID: LIB35-025-Q1-E1-C12
acacataaaaaaatgagtcaacacaacatcttagaagctctaaatgtccaggtcgtgggtacgggtgatcggatcctgtttttggcccatggattcggtactgaccaatcagcttggcacttgatccttccttacttcactcaaaactacagagtcgtcctctatgacctagtttgcgccggcagtgtcaaccccgattacttcgatttcaatcgttacacaactctcgatccttacgtcgatgatcttctcaacatcgttgattcactcggaatccaaaactgtgcttacgttggtcactctgtttccgctatgatcggaatcatcgcttcgattcgtcggccggagcttttctccaagcttatcttgatcggattttcgcctaggtttctcaacgacgaggattatcatggaggattcgaagaag

SEQ ID NO: 17406 - DNA, 439 bp, Arabidopsis thaliana
  unsure at all n locations
  Clone ID: LIB35-025-Q1-E1-C2
aagacgacagaagggaaaagatgggtgcaactgctccattttggcgattttcagcagcatcctatccagatctcaaggagcaagcgcctgttagtgttcttcgaagtagcaaaaaaggagccattgtccctcaaaaggaaacatcagcagggggagatgtttatcccgttgagccattttttgaccccaaggtacatcgtattctcgacgctcactggggacttctcactgacgaagatacnagtggactacggtcgcatactctatcattgcttgtaaatgatattccaggagttcttaatattgtgactggtgttttcgctcnaaggggatacaatatccagagcttggccgtangacatgctgaaaccaanggcaattcacgcattacaacagttatacctgcaacagatgaatccgtcaacaaaattggtgcaac

SEQ ID NO: 17407 - DNA, 453 bp, Arabidopsis thaliana
  unsure at all n locations
  Clone ID: LIB35-025-Q1-E1-C5
agaaggggggttcccagatcttcttcaaccttataccctagtttcgcaatttcattctcattttctccgctcttcatctctttcgatcaaccaatttacgacatggatgaggttgttgttgaagtggagaagacgaagagagaatgggaagaagcgtacgagaagacgattggacatattatctcgattcaacagtacggtaaatcaaggaggggagatggaaggagaagagaagtttccgttacagaggctcaacggattggctcaaggatggtctctctcttctcaattcccttcaattcaatttggntcngctcgcacctcaagcttccttcngatgatnanggttcaatccaantcaagtcactccttgaaaacgtggaagaatccaatatccacaagtttgangggtaaacttganaaantgctaatttgcaanctaagggataacat

SEQ ID NO: 17408 - DNA, 441 bp, Arabidopsis thaliana
  unsure at all n locations
  Clone ID: LIB35-025-Q1-E1-C1
acgacagaagggtacggctgcgagaagacgacagaagggtacggctgcgagaagacgacagaagggtacggctgcgagaagacgacagaagggtacggctgcgagaagacgacagaagggtacggctgcgagaagacgacagaagggtacggctgcgagaagacgacagaagggtacggctgcgagaagacgacagaagggtacggctgcnanaagacgacagaagggtacngctgcnagaagacgacagaagggtacggctgccagaagacgacagaanggtacngctgcnanaagacgacanaaaggtaccgctgccaaaagacnacanaaaggtaccgctnccnnnnnnnnnnnnnnnnnnnnnnnnnnnnnnnnnnnnnnnnnnnnnnnnnnnnnnnnnnnnnnnnnnnnnnnnncggcccnctaaagatccaactt

SEQ ID NO: 17409 - DNA, 472 bp, Arabidopsis thaliana
  unsure at all n locations
  Clone ID: LIB35-025-Q1-E1-C6
agttgtgggcaggttagatcaaaacggtggagagtgaagtgtcacttgtcacctgtaaaatccgccaagtattcctctaaaatatcaaccgatatcgctctccacgagtctcctcangccttgtttgatgaatatttggaagacaaatcaagggttttcgaagcaatgtttccggataaacccaaaaactataggcttaatgaggaagaatggagaatccaaatgttaccaataaaaattttcttcctcactggcgtgtccaattggtggtcatgccggattanatgcaaatcccaacgggtcaaggaattacccatcaagacgtaacctcctacacataaaccaaaaagttccttgaagcctcaaacaatgaacgaaaattnggaaaccttcaaaggggcttgaacccgaagttaattgggaaaccaaactggaattttcaactcccttgggaagttaaaaaggaagccat

SEQ ID NO: 17410 - DNA, 491 bp, Arabidopsis thaliana
  unsure at all n locations
  Clone ID: LIB35-025-Q1-E1-C7
agacgacagaagggtacggctgcgagaagacgacagaagggtacggctgcgaaaagacgacagaagggtacggctgccagaagacgacagaagggtacggctgcgagaagacgacagaagggtacggctgcgacaanacgacagaagggtacggctgcgagaagacgacagaagggtacngctgcgaaaagacgacagaagggtacngctgcgaanaagacgacagaagggcacggcttgccaagaagacgacagaagggttacggctgccaanaagacgacataangggtacnggcttgccaanaanaacgaaccagaaangggttacggctngccaaaaaatgaccaacctgaaagggtaacgggcttgccnaanaaagaccgaacagaaaaggggttacngcttgccnaanaaanaaccaaccggaaaggggttaccggctngccaaanaangaccanccagnaaaggggtaccggcttgccaacaaa

SEQ ID NO: 17411 - DNA, 437 bp, Arabidopsis thaliana
  unsure at all n locations
  Clone ID: LIB35-025-Q1-E1-C8
aagacgacagaagggagaagaagcagaagcagtaatggtacgagcttcatcgtcgaagaaaggaggatcaaaaggaggagacaaagacgacgcagagtcaaaacagaggaagagattaaaaaccctagctctcgataaccaattgctctctgattctccggcgaaatctcattcctctctcaaaccttcaaaagcaagttctcaaacaccatggnaccgacatcatccgcaaatctcaacgcaagaatcactttctcttctccttccctggtcttctcgctcctatctccgccggctaacatcgggcgatntcgatngantatctactaaaaaacctgtcctctancttaaatttccacanggtcgtatgaaactttttggaacgaatttggtatccgaaagaacaagatacttgactcttcaattccctagangag

SEQ ID NO: 17412 - DNA, 428 bp, Arabidopsis thaliana
  unsure at all n locations
  Clone ID: LIB35-025-Q1-E1-D10
tgctagagaattcagcaacaacggtacttcgtccacgacgtcgtcttcttctcactttgaagacgttcttgattcgtttcatcaagagatcgacaacagaaatttccagttttctaacccaaaccgcatctcgtcgctcagaccggacttaaccgaacagaaaaccgggttccacggtcttgcggatacttctaacttcgattgggctagttttgccggtaatgttgagcataataactcggtaccggaactcggaatgagtcatgttgttcctaatctcgagtacaactgtggctacctgaagacggaggaggaagtcgagagcagtcacgggtttaataactcgggcgagttagctcaaaagggttatggtgttgactcgtttgggtattcggggcaagttggtgggtttgggtttangtgatgat

SEQ ID NO: 17413 - DNA, 122 bp, Arabidopsis thaliana
  unsure at all n locations
  Clone ID: LIB35-025-Q1-E1-D12
ggctgcnagaagaccacagaanggtacggctgccagaagaccacagaaaggtacggctgccaanaagacgacagaaaggttccgctgccaaaagactacagaaaggtacngctgcaaaaaaa

SEQ ID NO: 17414 - DNA, 442 bp, Arabidopsis thaliana
  unsure at all n locations
  Clone ID: LIB35-025-Q1-E1-D4
aagacgacagaaggggaatgaggacagaaataaaaggaaaccaagtctgaaacacaatgattgattaatcacttataaggcctaaactcacttttcctanttttgcccttcttttagctcatcaacagagagagagatagatccatggagggtcttcaaagatcaacaatctctttccgccgtcagggatcttccggtatagtgtttgacgatcgtctcatcgccgaactcaacaaatcgggaaacaacgaagcagaaagacgaaaagtcaacgcgacgaacaacctaagcctatgtcggaaagctctgaacaggtcaaaccaatcgatgagaaagacaagcntanaccgattaaaaaccggtggaggagcaccangaaggaataganaagganccatttaaccgtggaggagctcaacgacatcattgaacaancgggaag

SEQ ID NO: 17415 - DNA, 425 bp, Arabidopsis thaliana
  unsure at all n locations
  Clone ID: LIB35-025-Q1-E1-D7
ttctacgtttcgttttctctgaaaaaaggctgctctaagattatatccatggcggaagaagttgggcttgatttggaagaactcaggcaactccagaacatcgccaagagacctcgtgttctcaatctcatcaattccgagatttcaaacttggagaagctgagagactctgcagtcagttcaaatgcgaaaccaaaggtaccagttacagttcctgcaccggtttcttcttcgggtaagccggtttcttcttcggcattgaactatgtaactctcggaacattcanctgggatcaagacaatgacaaagtcaagatgtncatatccttggaaggtgttgatgaggacaaggttcaagctgagttcaagccaatgtctttagacatcaagattcatgatgtncaaggaaaaaattaccgatgtgc

SEQ ID NO: 17416 - DNA, 420 bp, Arabidopsis thaliana
  unsure at all n locations
  Clone ID: LIB35-025-Q1-E1-E11
cttgacgattttgaatttgttactcaagatgcagaagcttgtgcaacttccgcgttctccaaatgtggatggcatcttgaagaagtacattgacagccaaatgaagaaacatggcagggtaacagattcattagaggaaattctgaaaggcttgcgttgctactttgacaaagctttaccggtgatgttgctttacaacaatgaacggaagcagtacgaggaatccgtatcagggggtgtttctccttcaactgtgtacggagcagagcatttgttgcgactctttgtgaaattaccggagttgctagtacatgtgaatatggcanaagagacattgaaggaattgcaggacaactttgttgatattctcaggttcttgaggaagaatcagagtgtgctttttgtatcgacatacaaagc

SEQ ID NO: 17417 - DNA, 449 bp, Arabidopsis thaliana
  unsure at all n locations
  Clone ID: LIB35-025-Q1-E1-E2
gcgtccgtacggctgcgagaagacgacagaaggatacggctgcgagaagacgacagaaggatacggctgcgagaagacgacagaaggatacggctgcgagaagacgacagaaggggatcgcaattcgtatcggtttaaagtaaaaaagcaatgggaggtggtaaagacaagcatcatgatgagcaagagaaaggatttcatggttttccaggaggtggacattacccacctgctcaaggaggttaccctcctcaaggttacccaccacaacaagggtatcctccagctggaggctacccacctgccggatatcctcctggtgcttaccctgctgcgcccggtggttatcctcctgcaccttgaaggttaccctcctgctggctatccctgcacctggagctcaacaatcaaggacattctggtngtggactccgangcattataacaag

SEQ ID NO: 17418 - DNA, 455 bp, Arabidopsis thaliana
  unsure at all n locations
  Clone ID: LIB35-025-Q1-E1-E4
aagacgacagaaggggatcgacaaaaaatttactgaaagcgaaaaaaataatggcagctttggcatcaaacccccaaatgctaactagacaagctcacggtaacaagaaggaacaattgtggaggaaagagagtttaaatttggagaagaagtgtgggttttgtgtgancgtttacagtaatgaaaagcttgggaggtcacatatggagaaagagtggagactaaaagccttttggtcaaacatagctcagcctacgactttggagatgggacccattaacaacgttgaagaactccatgctgttctctctcacgcacgccaactctctcaacctatcatcatccnaatgggatgggcttccntgggtgtccaaaaatgttattaacctgaaancctaaatttggngaaaanttaccgggcaagaattataattaaaccgagcaaaagttttttc

SEQ ID NO: 17419 - DNA, 430 bp, Arabidopsis thaliana
  unsure at all n locations
  Clone ID: LIB35-025-Q1-E1-E6
aacgacagaagggggagagggggcttttgaatttttttgctcaacttccaaatcgtcgccggcgatagaaaccctagatttgattctccgtcggttatatccagcaatgtcgttttttcccccacagcaacaacagacgcctcagccgctgtttcagactcagcaaacgtcgttgtttcagccgcagcaaaccaattccatcttctcgcaatcgcaaccacagcaaaccaattccatcttctcnnnnnnnnnnnnnnnnnnnnnnnnnnnnnnnnnnnnnnnnnnnnnnnnnnnnnnnnnnnnnnnnnnnnnnnnnnnnnnnnnnnnnnnnnnnnnnnnnnnnnnnttgtatttgttcaccaacgataaantccggcgaattacagtactaagtgggccgatcttcatcccgattctcanaaactcttgc

SEQ ID NO: 17420 - DNA, 439 bp, Arabidopsis thaliana
  unsure at all n locations
  Clone ID: LIB35-025-Q1-E1-E7
tgagatatctttccccaaattcgaaagaaccctaattttttccgattccgattgatcaaacaagcgaatcccgattaactgatcgaggagatgggtaatacagataagctgatgaaccagatcttgaattgaaatttacgtcaaagtctctgcagaggcaagctaagaagtgcgaaaaagangagagatnggagaaactcaaggtaaagaaagccattgagaaaggtaacatggatggtgctcggatntatgccgagaacgccantcgcaaacgcagcgaanaagatgaactaccttcgtcctctccttctcgaattggacgccggttgttgctccgactccaatacccaagcctaagatggctaccatcaccaaatccgatgaccaacattgtcaaatccctccgaatcgtctcttacaactgggcaacttacagaag

SEQ ID NO: 17421 - DNA, 420 bp, Arabidopsis thaliana
  unsure at all n locations
  Clone ID: LIB35-024-Q1-E1-F12
tggatatattgatggatttttatgtttttggtgaaaaggtgagaacttggttggagcaattgatcacgccttgaaagtgtttgataaaatggctcaggcaattggtccaagactgtatagttgctgcaactgcagaaaccatgttggacttcacgatgatatcatctctaaggcttttcagggaagaactgggcgagccttcttgttctcccacgcaatgaacattgtggtaggacctaaagaagaccggaatcttctaactggtctacacaccgtggctgatatatcttgtgttgactgtaacgaaccattgggttggaaatacgagcgagcttatgagacctcacagaagtacaaggagggcaagttcatattcgaaaaggctaagattgtcaaggaggattggtanaactgaagaac

SEQ ID NO: 17422 - DNA, 472 bp, Arabidopsis thaliana
  unsure at all n locations
  Clone ID: LIB35-024-Q1-E1-F6
gcgtccgtacggctgcgagaagacgacagaagggggagagagaacgaagcaaaaaacctcgctcgctagctatgtgaagaaactatcttcgttataaaactttccggcgacgttttccgacttccgagagcaggttttgaggtggttttatgcgccaaaacatctaaccggagtgtcgttgtacggtgcttagtagttttcaataacacgcttcagttatggggaatgcttgttgtgttgctactcgagacaaaatggttgtgcctaatacatcagcagtcgagaattttcaaagaaacaatgtgaggtattctcctaactggagcttccgatgggataatagaggangacgcgtggcaggggaagagacctctgttagtttgttatctgatcggattaatcgtaacaatgtctctgaagtcnaatctgaaactgctccttgtatcatcacaaggttctcctttggacattt

SEQ ID NO: 17423 - DNA, 476 bp, Arabidopsis thaliana
  unsure at all n locations
  Clone ID: LIB35-024-Q1-E1-F8
gcgtccgtacggctgcgagaagacgacagaaggggacacacaccaacgttgannnnnnnnnnnnnnnnnnnnnnnnnnnnnnnnnnnaaaccaaaaaatggcagatcagctcaccgatgatcagatctctgagttcaaggaagcttttagccttttcgacaaagacggagatggttgcatcacaacgaaagagctaggaacagtgatgagatcattaggtcaaaatccaacagaagcagagttacaagatatgataaacgaagtagatgctgatggtaacggaaccatagacttccctgagtttctgaacctaatggctaggaagatgaaggacactgactctgaagaagagctcaaagaagctttcagggttttcgataaggaccaagaacggtttcatctcggcagctgagttaagacatgtaatgacaaatcctggtgagaaattaactgatgaaagaaattgatgaaatgat

SEQ ID NO: 17424 - DNA, 421 bp, Arabidopsis thaliana
  unsure at all n locations
  Clone ID: LIB35-024-Q1-E1-E9
agatgaatgttcaaaaagaactaaattgtgtcaatagaaaactcaacattgctattaccagaatttccaatccgtatggggatcctaatattcttgcagaatttatcgctggacaattaaaaaatcgcgtttcttttcgaaaagcaatgaaaaaagctattgaattaactgaacaggcgaatacaaaaggaattcaagtacaaattgcaggacgtatcgacggaaaagaaattgcacgtgttgaatggatcagagaaggcagagttcctttacaaacaattgaagctaaaattgattattgttcctatacagttcgaactatttatggggttttaggaataaaaatttggatattcgtagacgaagaataaaaaaacttccttancttatattttatccgacgataaaaaaacgaaaatta

SEQ ID NO: 17425 - DNA, 430 bp, Arabidopsis thaliana
  unsure at all n locations
  Clone ID: LIB35-024-Q1-E1-G10
ggctgcgagaagacgacagaagggggttctggatatattgatggatttttatgtttttggtgaaaaggtgagaacttggttggagcaattgatcacgccttgaaagtgtttgataaaatggctcaggcaattggtccaagactgtatagttgctgcaactgcagaaaccatgttggacttcacgatgatatcatctctaaggcttttcagggaagaactgggcgagccttcttgttctcccacgcaatgaacattgtggtaggacctaaagaagaccggaatcttctaactggtctacacaccgtggctgatatatcttgtgttgactgtaacgaaccattgggttggaaatacgagcgagcttatgagacctcacagaagtncaaggagggcaanttcatattcgaaaaggctaagantgtcaaggagg

SEQ ID NO: 17426 - DNA, 425 bp, Arabidopsis thaliana
  unsure at all n locations
  Clone ID: LIB35-024-Q1-E1-G12
ggctgcgagaagacgacagaagggtacggctgcgagaagacgacagaagggtacggctgcgagaagacgacagaagggtacggctgcgagaagacgacagaagggtacggctgcgagaagacgacagaagggtacggctgcgagaagacgacagaaggggggagcgattcggtcaaaaccaacgctggattacacagcagaagatttctcgtttcatatttcgacaaacttagaatctgcttatcatctgagccagcttgcgcatcctctgcttaaggcttcaggatgtgggaacataattttcatgtcctctattgctggagttgtatctgctagtgtcggctccatctactctgcaacgaaaaggggcattgaatcanctagcaaggaacttggcatgtgaattggctantgatgcattaagg

SEQ ID NO: 17427 - DNA, 543 bp, Arabidopsis thaliana
  unsure at all n locations
  Clone ID: LIB35-024-Q1-E1-H1
ctggtncctgcactacggtgccgaatcccgggtaaacccacgcgtccgtaggctgcgagaagacgacagaanggggangtttgtttgtgaagcgtgtgaaggaaatgatttcaatggaggagaagaacacatacggcaaaagaaagactgttcctctgattccggctaactacatcagcatccttcagctccaggagcgttggctcaatgagaaagannnnnnnnnnnnnnnnnnnnnnnnnnnnnnnnnnnnnnnnnnnnnnnnnnnnnnnnnnnnnnnnnnnnnnnnnnnnnnnnnnnnagcggaggaggagaaacctatgaatccaaattatcggaagcattttgggaaaaaaaaaggaatcctatagacgggcggnnaaancacgatttccttnagaaaggagaaaacccggaaagtcaccgtggccattcgaaaanccgttggaaggttnaaaaatncccggcgggntggntttanccgaanaaagaangaagaaagaattaaaggggaaccttggnngggaaaccanttttattttc

SEQ ID NO: 17428 - DNA, 461 bp, Arabidopsis thaliana
  unsure at all n locations
  Clone ID: LIB35-024-Q1-E1-H10
gcgtccgagacgacagaagggggggttaggtttgtcttcaaaatcgtcagaagaagaagaagaagtcaaagacgataacaatgacgtcatcatcgtacctccgatttgcgatcgccgtcgtagctttcctctcaatcaccaccatcaccaccgcacgtccttgcaaaaccttcctaatctcctcatattccctctcaataaccccagaaaaccctaacctcgaatccgatttcacctccacacgattcgtcaccgttttcacaatccgtcgtctaaatcctcatcacgtggttcctttcttcgtcaatcgtcgtcacgagaagccacagatccaatcggatcgttccctccctttgatctctgataacatcaattcgtttagagatngaaccagagatattcttagcgtcgtcgtcgcgcctttgttcggtgttggttgtgggtgcttaaaccgctgctac

SEQ ID NO: 17429 - DNA, 503 bp, Arabidopsis thaliana
  unsure at all n locations
  Clone ID: LIB35-024-Q1-E1-H2
cgggccnaatccgggaaacccacgcgtccggctgcgagaagacgacagaagggtacggctgcgagaagacgacagaaggatacggctgcgagaagacgacagaaggatacggctgcgagaagacgacagaaggatacggctgcgagaagacgacagaaggatacggctgcgagaagacgacagaaggatacggctgcgagacacgacagaagggtacggctgcgagaagacgacagaagggtggttagagagctgggagcgagaagatacttatgctgctcttgctgttgtctgtgctgctgcttccgtggctgttgcctatacttgctacaaacagttgtaacgaagaaatttgtagccctaagatgattgtgtattgtgttcttataagacattgtgattttgtttctgctttcaaactacattttcctttcnatttaaangaaggttcctgtcaaaactgtttgatgatatgtacccggttaactccgccttccgccttc

SEQ ID NO: 17430 - DNA, 432 bp, Arabidopsis thaliana
  Clone ID: LIB35-024-Q1-E1-H8
atttaaacggaaacgctaaagaatacaatcttattgatggtggagttgcagctaacaacccggctttgttggccattggggaagtaacaaatgagatctcaggaggaagcagtgactttttcccaataagaccaaatgattacggaaggtttcttgtgctttcgcttggaaccggaaatcataaagccgaagagaaattcaatgcaaaagaagtagctggttggggactattgaattggttaacacacgacaactctacacctatcattgatgctttctcgcaagctagctccgacatggttgatttccatctctctgccgtttttcgagctcttcattccgaagccaactatattcgcatccaggatgacacattaactggggatgctgcttctgttgatatcgctaccgtcgagaatcctggacattcct

SEQ ID NO: 17431 - DNA, 429 bp, Arabidopsis thaliana
  unsure at all n locations
  Clone ID: LIB35-024-Q1-E1-H9
aagacgacagaagggggaagatcatcacaagcaaagaaaatggagagcgattcagagatggttccgtttcctcaactaccgatgccaatagaaaacaactacagagcttgcacaattccttacagatttccttctgatgatcccaagaaagccactccaaatgaaatctcgtggatcaacgtcttcgccaattccattccttctttcaagaaacgtgcagagagcgatatcactgttccagatgctcctgctagagctgaaaaatttgcagaaagatatgctgggattcttgaagacttgaagaaagatccagagagtcatggcggaccaccagatggcattcttctatgccgacttcgtgagcaagtactcagagagttaggatttagggacatattcaagaaagttaaggatgangagaatgcaaag

SEQ ID NO: 17432 - DNA, 441 bp, Arabidopsis thaliana
  unsure at all n locations
  Clone ID: LIB35-025-Q1-E1-B11
cgaacaaacatgagcttgacgctgcttcaaggctattcttctnnnnnnnnnnnnnnnnnnnnnnnnnnnnnnnnnnnnnnnnnnnnnnnnnnnnnnnnnnnnnnnnnnnnnnnnnnnnnnnnnnnnnnnnnnncttctgtgtttgatttctctgcatctgcctcctccgctaaaaacgccggccttccttcagctgacgacgttttctctcagatttcagggccaccgggagtttctaaacaaccgcacagaagcagataatgaagcttcagctagagatgcagaacatgcaaatccgtattantcccaaaaagaaagaaagtttaancaaaaaggtgttgtcatgggaagcaaaanctcaactagttaggaatccatganaganttagaaacgatatngntggaacccccatcntnaaanaattggggaaaagcgggtat

SEQ ID NO: 17433 - DNA, 435 bp, Arabidopsis thaliana
  unsure at all n locations
  Clone ID: LIB35-025-Q1-E1-B2
ggctgcgagaagacgacagaaggggactatctggacactttcgatttctgaagttgagagacgactatggcgacgaacaatggtgatgtcttgatgttggaggcgacgccggaggctgcgaggccctgggctagtgcggcgaatgcagaagttatcgatgcgcttccttatatagacgacgactatggcaatccattgattaagtcggaggtagaccgtttggtggaggaagagatgcgtcggagctctaagaagccagctgagtttctaaaggacttgcctcctcttccgaagttcgattttaagaactgctcctgttcttgggcaaaagagtatganccgtgttanagctgggaaacctcctgtgcggataaanttcnaatcccgatacaaaacttgaaatgncaactgncaataagaagaatgatgatgctg

SEQ ID NO: 17434 - DNA, 439 bp, Arabidopsis thaliana
  unsure at all n locations
  Clone ID: LIB35-025-Q1-E1-B4
aagacgacagaagggtacggctgcgagaagacgacagaagggtacggctgcgagaagacgacagaaggggacaacaacagattttaaaaaaccccaaaaactttacattcttaacaatttcaaccctatgggcttacttgatcatctctgggatgatactgtcgctggtccacggccagagaacggccttggcaagcttcgtaaacaccgtaccttcagtttccgacctagctccggcaatgatcaatcggaagctggaagtgtgagatcgtacggtgaggattcgctaccggaagaagcagttaaagttacacgtggtatcatgataattaaaccaacgggttaccaangnaattcaactccaacttccctggccgggntcaactccgccgctatcaaccctctctccgccgctgtctcgntctcctgaacaaaaaca

SEQ ID NO: 17435 - DNA, 428 bp, Arabidopsis thaliana
  unsure at all n locations
  Clone ID: LIB35-025-Q1-E1-B6
ggctgcgagaagacgacagaaggggggagctcttaacctacgcggatgctccgattttatgacagctgagctcgatttggttgataaacaaaggcttcaagaattctaccggaatcaatggaggttctggtaggttctacgtttagggatcgtagcagcgtcacgacgcatgatcaggccgtaccggcgtctctgtctagccggattggtttgaggagatgtggtagatctcctccgccggagagttcgtcgtccgttggagaaaccagcgaaaacgaggaagatgaagacgacgccgtttcgtcatcacaaggaagatggctcaattccgtttagttcatctttggaagattctcttccgattaagagaagattatcaaaccattacatagggaaatcnaatcgtttggggaatttaatgggaagcg

SEQ ID NO: 17436 - DNA, 459 bp, Arabidopsis thaliana
  unsure at all n locations
  Clone ID: LIB35-024-Q1-E1-B10
gcgtccgtacggctgcgagaagacgacngaaggggactcaccacataaagtaaaagtctcatctcttcataaaatagctttaaaccaatcaagtagagtttcttctnnnnnnnnnnnnnnnnnnnnnnnnnnnnnnnnnnnnnnnnnnnnnnnnnnnnnnnnnnnnnnnnnnnnnnnnnnnnnnnnnnnnnnnnnnnnnnnnnnnnnnnnnnnnnnnnnnnnnnnnnnnnctctaaatccttccaaaatcttggtatctcatctaacggttcagatttctcctatccatcaagtttcactgccaagaagaacctcactgcttctcgagctctctcccaaaacgggaatatcgaaaaccctagaccaagcaaagttcaagaactgagtgtgtacgaaatcaacgaaattagatngacacaagccccaagattcttaaaaacgcattcagcttaatgttcg

SEQ ID NO: 17437 - DNA, 507 bp, Arabidopsis thaliana
  unsure at all n locations
  Clone ID: LIB35-024-Q1-E1-B2
taccgggccggaatcccgggacgacccacgcgtccgcccacgcgtccgacggctgcgagaagacgacagaaggggatggaagccatcaagaaaatgaactacagaggctggcggactaaagttctggatataacttatgcaaaagaaagaggtacaaaagggttagaggagactttggaccgaatttgtgatgaagcaaatgaagcaataaaggagggctacacattactggttttgtctgatcgagctttctctgcaacacgtgttgctgtgagctccctcatggctgttggtgccgttcatcaccacctggttaagacacttgcgcgcacccaagttggtttggtagtggaatctgctgaaccacgtnaagtgcatcatttctgcacacttgtccggatttggagcagatgctatcctgcccataatttggctgtaaaggcgtttatagattacaggttnatggcaaatacaaccaaatctaatggggaaatccaatccaaagaa

SEQ ID NO: 17438 - DNA, 449 bp, Arabidopsis thaliana
  unsure at all n locations
  Clone ID: LIB35-024-Q1-E1-B8
gcgtccgtacggctgcgagaagcgacagaaggatacggctgcgagaaaacgacagaagggtcctaaggaaagagaaagacgggttccgatgacaagacttcggaaacgagttgcaacaagattgaaagactctcaaaatactttcgcgttgctgacaactttcaatgaagttgatatgacaaatttgatgaagctccgatcccaatacaaggatgcatgttatgaaaagcatggagtgaagttggggcttatgtctggatttattaaagctgctgttagcgcccttcagcatcaaccagttgtaaatgcagttattgacggggatgatatcatatacagagactatgtggatatcagtatcctgttggtacctctaanggacttgtagtaccngtcatannaangtgctgatcaaatgaactttgccgagatcagaagacaatacnctc

SEQ ID NO: 17439 - DNA, 412 bp, Arabidopsis thaliana
  unsure at all n locations
  Clone ID: LIB35-024-Q1-E1-B9
agatgaatgttcaaaaagaactaaattgtgtcaatagaaaactcaacattgctattaccagaatttccaatccgtatggggatcctaatattcttgcagaatttatcgctggacaattaaaaaatcgcgtttcttttcgaaaagcaatgaaaaaagctattgaattaactgaacaggcgaatacaaaaggaattcaagtacaaattgcaggacgtatcgacggaaaagaaattgcacgtgttgaatggatcagagaaggcagagttcctttacaaacaattgaagctaaaattgattattgttcctatacagttcgaactatttatggggttttaggaataaaaatttgggatattcgtagacgaagaataaaaaaactttctttatctttatattttatccgacgataana

SEQ ID NO: 17440 - DNA, 421 bp, Arabidopsis thaliana
  Clone ID: LIB35-024-Q1-E1-C10
ggctgcgagaagacgacagaagggtacggctgcgagaagacgacagaaggggaagataaaagattcaacgggaaaaaagctttatctgaagcctctgtgattgtaagggaacacactccattgacaaatctattcatgtgcctctggttcaatgaagttgtccgcttcacttcgcgtgatcaattgagtttcccatacgttctttggcgtttgaaagttctcaagaacatcaacatgttccctgtctgtacacgtaaagatctcgtcaatagcataggccatgtacgcaaggctaaaccgttagttaccctatgaatttactgtaagcttccaattcattggttattttagaatctttttgtatttagcgtgtagacataaaaacagaactgacatgttttaaactgaaaccgaactaaac

SEQ ID NO: 17441 - DNA, 518 bp, Arabidopsis thaliana
  unsure at all n locations
  Clone ID: LIB35-024-Q1-E1-B1
ctggttgcntgggttacgggccnaatntcgggangacccacgcgtccgtacggctgcgagaagacgacagaaggggagatttgatttctttgcgggcttgttaatggcgaacccagggcaatcaaagggatggataaagaaatggacgtctatggcttcatcggtttacttcgtcttgatcttattccagatccctctcttcagagttccatgtagatctggtatgtgttcatcgccaatccatgtgacatcgtctcagttgatttctagtgagatctttcctgttccgatgattaaggctctcttataccctggtgctgtagtcaatggccttgccatcaacatgacatttccaaagtgggaaaatgtgttagatatctacaatctcaccaatgtgaaaggagcttctgcagtgaccgattttcaacgcctaaaaggttcntgcanggagctacttttctgtaacctgggggcgtttgtggggttgctaaaacctggaaaggatnacaagtttgggt

SEQ ID NO: 17442 - DNA, 461 bp, Arabidopsis thaliana
  unsure at all n locations
  Clone ID: LIB35-024-Q1-E1-C11
gcgtccgtacggctgcgagaagacgacagaaggggatgacgtatctaatgaagtacccacaagtgttgaagaaagctcaagcagaagtgagagagtatatgaaagagaaaggttcaacgttcgttactgaagacgatgtcaagaaccttccttacttcagagccttagttaaagaaaccctaaggatcgaaccagtgattcctctccttatccctcgtgcttgcattcaagataccaagatcgccggttacgacatccccgcaggaacaacggtcaacgtcaacgcgtgggccgtgtcacatgacgagaaagaatggggaccgaaccctgatgagtttaggcccgagaggtttcttgagaaggaagttgacttcaaaggcacggactacgagtttataccgctcgggtcaggccgganatgtgcccgggaatgcgtcttggggccgccaatccttgangtt

SEQ ID NO: 17443 - DNA, 436 bp, Arabidopsis thaliana
  unsure at all n locations
  Clone ID: LIB35-024-Q1-E1-C2
ggctgctnnnnnnnnnnnnnnnnnnnnnnnnnnnnnnnnnnnnnnnnnnnnnnnnnnnnnnnnnnnnnnnnnnnnnnnnnnnnnnnnnnnnnnnnnnnnnntgctgaaaagcgtcgatgaggaggttgtggtggccgaggaggggatcagggagaagataggtagtgtacagctgacggattccaaacattctttcttgagctccgatgggagcctccctgttcatgccggtgaaagattaggccgtggtatagtgacggatgctatcactactcctgtagtcaacacatctgcctacttcttcaagaaaactgctgagcttattgacttcaaggagaaaaggagtgtgagtttcaatatggccgtaangtaacccacgaactgtgtacttgaagataagataatncacttgaagggctgaatcaactttggttat

SEQ ID NO: 17444 - DNA, 525 bp, Arabidopsis thaliana
  unsure at all n locations
  Clone ID: LIB35-024-Q1-E1-C3
tttcctgcncctaccggtcccgaatcccgggtacgacccacgcgtccgcccacgcgtccgtacggctgcgagaacgacagaagggaaaagagggtcatcagctaaaagtgaagctcaagacaagggtattagcattataaggctacgtgcagatctccagaatgccattgacagtgaggattacggtttggcagctaagttacgagatgaaatctcaaagcttgaggcagaatcattagctgtatctgcgaaagccttggcttttgagaaagcagagtatgcatttcgtttgggacagaaacttagacacaaaacttttggttaccgggctgtaatgtgtggtatggattcaaattgcagtgaatcaagcctcctggatggaaacctgcaaaagttnaaaaattacctcctggattcaatcaaccaatttatcaaggtccaatccaagttccggacgcanccaaatttactaaatggcataagttgccgaaaacaatctgttaacncctgaaaaaacccataaag

SEQ ID NO: 17445 - DNA, 414 bp, Arabidopsis thaliana
  unsure at all n locations
  Clone ID: LIB35-024-Q1-E1-D10
ataaaaacaaaaacatataatttgggtttttagagttcgaaacttgaaatcttttttttttggttgctgaggaatcgaagtagaagagtataaatgggtgttagagagaaagatccgttagcccagttgagtttgccaccaggttttagattttatccgacagatgaagagcttcttgttcagtatctatgtcggaaagttgcaggctatcatttctctctccaggtcatcggagacatcgatctctacaagttcgatccttgggatttgccaagtaaggctttgtttggagagaaggaatggtatttctttagcccaagagatcggaaatatccgaacgggtcaagacccaatagagtaccgggtcnggttattggaaagcaacgggtactgacaaaattatcacggcggatg

SEQ ID NO: 17446 - DNA, 460 bp, Arabidopsis thaliana
  unsure at all n locations
  Clone ID: LIB35-024-Q1-E1-D2
aagacgacagaaggggggaaggcggcgaagctgattgcaactggctcaggacatttgataaaagggattctttggtgtggagatgtgactatggataggcttatttggggaaatggtttcatgaaaaggaggttgtcaaaggctgagaaggagagtgaagttcaccctgacaccttgaaaagaatcagaagagtgaagaggatgaccaaaatgacagagagtgtagcaaacagcatactgtctggagtccttaaagtttctggattcttcacaagttcagtggcaaacaccaaagtaggaaagaaattcttcagccttcttcctggaagaagtcatccttgcatctcttgacggattcaataangtctgtgaaccctgttgaaataacctgggaaggaatgttaatgtcaanctccnttcaactgttacaaaccgaactccgttgatnaccaaattatgg

SEQ ID NO: 17447 - DNA, 440 bp, Arabidopsis thaliana
  Clone ID: LIB35-024-Q1-E1-D6
acagaaggggactcgagatttttcgctcttgagagaatcacttcgacaatgtcggtaacggctgctttcattgattcggatcaaactcagcacaacattcttatggattcccaatcaactgtctccggtgtgaaaactgtcaagattagcaatgtttcactaattgtttctaagaaagatgtcaaagagttcttttctttctctggtgacattcaatacgtcgagatgcgaagtgagacacaagagagtcaggtcgcatatgttacttttaaggattcacaaggagctgaaactgcaatgctcttaacgggagctgtcattgcagatcttcgtgttagtataactcctgctgttaactatcagctaccaacagaagccctcgcactcgactcggaacattcgtttaatgggttttcctgtcaagaaagcctgaaagatgt

SEQ ID NO: 17448 - DNA, 464 bp, Arabidopsis thaliana
  unsure at all n locations
  Clone ID: LIB35-024-Q1-E1-D8
gcgtccgtacggctgcgagaagacgacagaaggggaaaacaaaacgtaataaaaaagtgtataaaattttatggtgaaaatacaccagaatgattgaaatggaaaggcttaccttttgggctatggaagcggccggatcggacacagggctaagtatggctcgagccttcgtctcacgatgcaaaccggtctttgctatgcttaaccgttggcaatggattgtaccggttctagggaaacggtttgatccatcacctagccggtttgatcgactaaccattcggttttctccgagatgatccgtacggaacactccatttcctttgaagagctccggcgttgtcttcacgatcatacttgtcattttctttcttatataaaagcataaaccacttanataaatntnatatncttacntttangaattgtatatancnnnaaagaagtttaagagaaanggagtg

SEQ ID NO: 17449 - DNA, 473 bp, Arabidopsis thaliana
  unsure at all n locations
  Clone ID: LIB35-024-Q1-E1-E7
cgagaagacgacagaagggggagagagagagatgtcgttcatgtatgagaagagcaatacatggagatggctagtgatgaagacgcgagattcgagatccttcttcttcacgttcgctgctttatgtggtgtcattcctggcgttattggctatggagttatgcaggtcaccaattccagtaaccctgagctcgaagcccgcctccgtaaatctgctcgcccagatactctcatgatgggtaaagtaaaccaagagaggctagctgaatatcttggtgagttgaaacagaagcaggatacaaacgacagatacgttgctgctcttaggggagagactcttaccaggaagccttatcaaagaatccaaccaatgccaaagccagatgacacggtgacaaccaaaactcagttaggatgaattaatttaaagagtcaatgtttagtgaatgcctcccantccaatccttgtccaa

SEQ ID NO: 17450 - DNA, 409 bp, Arabidopsis thaliana
  unsure at all n locations
  Clone ID: LIB35-021-Q1-E1-H6
gagaagaagaagaaggaatcgaaaaatgaagactccgatccacgcggtttcgacatgggtgaggaggcagcttccaaaggtgaaagctttccttgccgtcgtatctggcatggcggctcttgttctcctcaaactcatcgttcacgatcacgacaatctcttcgttgccgccgaagctgttcattctattggaatctctgttcttatctataaactcatgaaggagaagacttgtgctggattgtcattgaaatctcaggagcttacggcgatatttctagctgtgaggctttattgcagttttgtaatggaatatgatatacataccattctggacttggctactttgggaacaactctcctgggttatatatatgattcgttttaacctcaaaactacntacatgga

SEQ ID NO: 17451 - DNA, 470 bp, Arabidopsis thaliana
  unsure at all n locations
  Clone ID: LIB35-022-Q1-E1-A1
gcgtccgtacggctgcgagaagacgacagaagggggagagcgaagaacacaatcccagagtagcagaatctgatccatcccacctttttcaattctcaggcaaagataagtcaaacttgaaaaaatgtaagggaccgtgttcacgccttgtttggaaggaatgaagcatgtcaaatctgatcaaggcgagatgcttactaagccatttttagagctttgcaagaccatcttgcctgttatagataaatttggagctgctatgactctcgtgaaatctgacattggtggcaacataacgaggttggagaagaactacttatctgatcccgacaaagttcaagtacttgtacacctttggttcaaagtccgaaaattgatccnaagatagcaaaaaggttctccanccgttcaaacngtcctcccctgggttaancaaagcaatgggnttcctaatggagctgtttccnaaa

SEQ ID NO: 17452 - DNA, 436 bp, Arabidopsis thaliana
  unsure at all n locations
  Clone ID: LIB35-022-Q1-E1-A11
gaaaaaganagatggctgaagcagcgagaagacaaggtggtgggatgaccattaccgccacctccgagaggcgttaaccancaacctcctcgccctaaacctgaacctgtcgatcgtgaaaagacatgtccccttcttcttcgtgttttcaccaanagtggtggtcatcatactantgaagattatgctgtgagaggcagnagaaccaaaggatgaagttcaaatctacacttggaaagatgccagtcttcgcgagctaacagatttggttaaagaagtttctgtagcagctatgagaangaatgctanattgtcttttgcgtttgtttatcctaacaataaaggtggctataatgtgagaaaagttggggatacgatngcttatccaaaccgattacaaccagatnacagttaaaacgctttccgaaacttccgt

SEQ ID NO: 17453 - DNA, 432 bp, Arabidopsis thaliana
  Clone ID: LIB35-021-Q1-E1-H2
atgaatctaaagcaattgtcagatttcagcatctcccatggaggaatcaagattcgattctgaagatgttgattatgctgagattgttgttgttcgtcatggtgaaacatcttggaatgccgagagaaaaatccagggtcatttggatgttgagttaaatgatgcaggaagacaacaagcacaaagagttgcagagcggttatcgaaggagcagaagatatctcatgtatactcttctgacttgaagagagcctttgagactgctcagatcattgctgctaaatgcggcaagcttgaggtgcttaccgatcgtgatttgcgggaaagacatttaagagatatgcaaggacttgtgtatcaagaagcttcgaaaattcgcccggaagcttacaaggctttttcatctaaccgcacagacgttgatattccaag

SEQ ID NO: 17454 - DNA, 504 bp, Arabidopsis thaliana
  Clone ID: LIB35-022-Q1-E1-A4
ctaggctccggaatccaggtcgacccacgcgtccgtacggctgcgagaagcgacagaagggggactcactcagtgtgcgcgattcatttcaaaaacgagccagcctcttcttccttcgtctactagatcagatccaaagcttcctcttccagctatggctgcttcagtacactgtaccttgatgtccgtcgtatgcaacaacaagaatcactctgctcggccgaaacttccaaactcgtctttgttacctggattcgatgttgttgttcaagctgctgctactcgattcaagaaggaaacaacaaccacaagagccactttgacgtttgatccaccaaccactaattctgagagagctaagcagagaaaacacaccattgatccttcttctcctgattttcaaccaattccatcttttgaagaatgctttcctaagagcactaaagaacacaaggaagttgcccatgaagaatctggtcatgttcctaaagttccctttcgtcg

SEQ ID NO: 17455 - DNA, 506 bp, Arabidopsis thaliana
  unsure at all n locations
  Clone ID: LIB35-022-Q1-E1-A5
aaacggaatcngggtcgacccacgcgtccgtacggctgcgagaacgacagaagggggtcgtcgcgtctcttttctggaaaaaacgagaaactgtgatcttggcccttttattacccctatcctcttcttcttcaatctctccgatcaaaatccttttaagctctgtagacccaggttacgcagagaagaagaacagaacaaggaattatataatcattggcttgatcaatctgaattgcagttcatggcgctaaaccctcaattactacccaatgggatgcctgttccctttgttaatgaaatgttcgtcctagtccgagatgggtgttgagtttgaagtcgacaagatccctggnagggcatgggaggtcatggttaaagggcnaaggggggtgatttacttggccnaataatacggatggncctttggttcaagcaagncctgttganaacttggtggctttgganaaggccccngcttaaaaccaaggcccgggaaaatttat

SEQ ID NO: 17456 - DNA, 440 bp, Arabidopsis thaliana
  unsure at all n locations
  Clone ID: LIB35-022-Q1-E1-A6
gcgagaagacgacagaaggggaagccggtttcaaattaaggcgaagagagggtcttgtgagtcagaagagtgttgaagcaatgcttattacaagtcatgtgagaagaaactcccaacacaataatggcgacgctagcgagaaggagaattttgaggatgacattgtattggatgaggtttacagatcttatctcaaacggttagtggaaaattcgaaaagttcaagaactaatcctgaaaaagagataaaagtaaagtgtgaggaggatcatacagtgtctttgtctgattctgattctgatattattgtggttggagattgtccatttctggaagaagaggattctccatttgtgccatcaaaaagttataaagtgattgatttggatgaagagagcagtgatnaacgcaattcctggtttaggagggagataatgaat

SEQ ID NO: 17457 - DNA, 511 bp, Arabidopsis thaliana
  unsure at all n locations
  Clone ID: LIB35-022-Q1-E1-B3
aactggttgcggttcctacggcncangaaatcgcgaagtcgacccacgcntccgtacngctgcgagaagacacagaaagggcaaaaaagaaaaaaaaacacanaaaatttcaatggccgcctcaacaatggctctctcctcccctgctttcgccggaaaggctgtgaacctttcccctgcggcatcagaagtccttggaagcggccgtgtgacaatgaggaagactgttgccaagccaaagggtccatcaggcagcccatggtacggatccgaccgagtcaagtacttgggtccattctctggcgagtcacccagctaccttaccggaaaattccctggagactacggatgggacacaactggtctatccgctgaacccgagacattcccaaggaaccgtnagctaaaaattatccacagcangtgggccatgctccgganccctaaggtgcgtcntccctgaacttttggccaagaacggaatcnattttgaaaagcatttggtccaagn

SEQ ID NO: 17458 - DNA, 516 bp, Arabidopsis thaliana
  unsure at all n locations
  Clone ID: LIB35-022-Q1-E1-B4
cggttgcttgcctacggctccggaatcccaggtcgacccacgcgtccgcnanaagacgacanaaggggacnaaaggaaaatatgagtgaggagaagaggaagcaacacttcgtgctagtacatggtgcgtgccacggcgcatggtgctggtacaaggttaagcctcttctcgaggctttgggccatcgtgtaaccgccttagacctagctgcttccggtatagacacaaccaggtcaatcaccgacatttctacatgtgaacaatattctgagccattgatgcagctaatgacttcattgccgaatgatgagaagttgtactcgttggtcatagctttggaggtttgagtttagccttagccatggataagtttcccgataaaatctctgtctctgtcttcgtgactgcattcatgcccgacaccaaacactcaccatcgttcgtcgaggaaaanttgcaagcagcatgacaccagaaaggatggatgggctctgaactcnagacatatggttcag

SEQ ID NO: 17459 - DNA, 449 bp, Arabidopsis thaliana
  unsure at all n locations
  Clone ID: LIB35-022-Q1-E1-C1
ggaagtcgaaatccgctaaggagtgtgtaacaactcacctgccgaatcaactagccccgaaaatggatggcgcttaagcgcgcgacctatacccggccgtcggggcaagagccaggcctcgatgagtaggagggcgcggcggtcgctgcaaaacctanggcgcgagcccgggcggagcggccgtcggtgcaaatcttggtggtagtagcaaatattcaaatgagaactttgaaaggccgaagaagggaaagggtccatgtgaacgggcactttgcacatgggttagtcnattctaagaatccnggggaaaacccttctgataaccgcntaagccccgaactttcaaaagggattccggtttaaaattcccggaaccgggaacnttgccgttnaccggcaaacntttanggaatcccngaaaacntncggcngggggcctcccgggaaaa

SEQ ID NO: 17460 - DNA, 509 bp, Arabidopsis thaliana
  unsure at all n locations
  Clone ID: LIB35-022-Q1-E1-C11
tncacaggtccggaactcgcgggncgacncaaagcgtcctgnacntgnctcctntanaggctgccgaaagacgacagaanggggcatccaaaaaaaacantacanaaaattatattcaagagaaaaaggaaaaaatgaatttcatctccgatcaggtanagaaactctcaagctcaacaccagaggagccagaccacaacaagccagtcnaangaaccgaaacagctacaagaccagctaccaacgccgagctcatggcaagtgccaatgttgtanctgaagctgctcaagccgcagctcgtaacgaatcagacaaactcgacaagggtaaagtcgccggagcctctgctgatatcttagacgctgcccagaaatacngtaagttcgatgaaaagagtnaccactggtcaagtacctcnaacaaggctgagaagtntctcaaacgactaacaagtcgtcacactccaaccggtgctggtggtcctcctcctccgacgaattcaggctgn

SEQ ID NO: 17461 - DNA, 465 bp, Arabidopsis thaliana
  unsure at all n locations
  Clone ID: LIB35-022-Q1-E1-C12
gcgtccgagacgacagaaaggatggatagtttattacaagggtttttggatgagcatagagctaacaaagacagattggagtttaagaacaccatgattgctcatttacttgattctcaagaaaaagagcctcataactacagtgatcaaaccatcaaaggtcttatactgatgatggtagtaggaggcacagatacatcggccttaaccgtggaatgggcaatgtcaaatttattgaatcatccacaaatactagagaccacgagacaaaacattgatactcaaatggaaacatcaagtagtcgtcgtttgttgaaagaagaagatttggtaaacatgaactacttgaaaaatgttgtgtcggagacactaagactttaacccgtggcaccactttatggttcctcatgtgccatctccgactgtgtaatccgtggattcaacgttccacgtgatacgatngtg

SEQ ID NO: 17462 - DNA, 488 bp, Arabidopsis thaliana
  unsure at all n locations
  Clone ID: LIB35-022-Q1-E1-C6
ggaaatcgcggngtcgacccangcntcnncccanacgtctgtanggctgcgagaagacgacagaaggggggagacataccaaaanaaagcctaaaaagccgaccttttttctttctttctctcctctacctctcagcttctgctggatctctccagcagacacgatcttgttcggagagattcgtaggggaacgatctatcaaggcttcaaggggcaaacagaaatggancacgacaagacaggatgccaaagcccacctgaaagtcccaagctatgtactaacaactgcggtttctttggaagcgctgccacaattgaaacatgtgttccaangttgtcacaagggatatgttgttcaacangancagggcgctnagtttgcatctgcantgtctggaanatcgtcaacccagcaanatcataaaggaaancttttaccgctncatnggtccaatattgaaaaccanatccgttnacccgatgctgt

SEQ ID NO: 17463 - DNA, 429 bp, Arabidopsis thaliana
  Clone ID: LIB35-022-Q1-E1-D10
gctttgaacgtttgttggctcgttattcaggtttggggagtcgtgaccagctgcgaaaccgagccttgtcacatgtgagaaggaacttctctctccaatgtttggagggcttgatgatattggggcagagtttcccagagcttaagagagacacaacaaaagcttcttattagatcaataaacctaaaatccaattacgagacgagagattcctcttgtttaccttcaaagtcatccaaggaaaatgggggaaagtcatcactagaagacgactgcccaaaactggccatcaatggtacaagctctgcagctgcagctacttcagctttgatttaatttttcgattctgaaatatgaacatcatatgatcttaagtcctgattttccctaaacaaagggaattcataggagaattagacccaaagcaaa

SEQ ID NO: 17464 - DNA, 428 bp, Arabidopsis thaliana
  Clone ID: LIB35-021-Q1-E1-C4
gcacttaagtaatggctacaaagacatcaaatttaggtcatcttcttctgtctttgtttattctgctcttgtttatcttatctcaagttggagtcgcccaggccaaacgtctccaacaaaggaacaaattgcgtttggattgcgttcctcttcctcctccccctccacctctccgtggcatcgtcaaacctcctatcgcttcgtttcactctgcatcgcctaaagataaaggcccataagccataagtcatcatagtgcaggataagaggtcaagagagttttataagtattttgttatacaaaaccatgttgtatcatattttttatttatagttaaggtttttttttcgtgtctacaacacatgtacacacacaatcagacgtatatctagaataaaataaaaaagctatatcaaaaaaaaaaaaa

SEQ ID NO: 17465 - DNA, 409 bp, Arabidopsis thaliana
  unsure at all n locations
  Clone ID: LIB35-021-Q1-E1-C5
agaggtaaaaatgacaactccagcagtgaagaccggtttgttcgttggattgaacaaaggacacgtcgtcaccagacgtgagctagctcctcgtcccaattctcgcaaagggaaaacgagcaagaggaccatattcataagaaaactgattagggaagtagctggaatggctccttatgagaagagaatcactgagcttctcaaggttgggaaagacaagcgtgctcttaaggttgctaagaggaagttgggtactcacaagagagctaagaggaagagagaggagatgtctagtgttctccgcaagatgaggtctcctggtggtgctgctgctgctgagaanaagatgtagacatcttaataagctctgtgttatggcatatttccttctattggaaatcaagttttg

SEQ ID NO: 17466 - DNA, 426 bp, Arabidopsis thaliana
  unsure at all n locations
  Clone ID: LIB35-021-Q1-E1-C9
gcgtccgtacggctgcgagaagacgacagaaggggattgagggagaagaatcacattgatagattcgccgccgatctagagccgttgattttcttaatcggaaaaagaaaatgagtggaagcagaaggaaggcgacgccggcgagtaggacgcgagtagggaattacgagatgggacgaactctcggagaaggaagcttcactaaggtgaaatacgccaagaacaccgtcaccggagatcaagccgctatcaaaatcctcgaccgagaaaaggtcttccgtcacaaaatggtcgaacagcttaaaagagaaatatctacaatgaaactgattaaacatccaaatgtggttgaaatcattgaggttatggcgagcaaaacgaagatctatatcgttcttgagcttgtcaatggangtgaactccttg

SEQ ID NO: 17467 - DNA, 405 bp, Arabidopsis thaliana
  Clone ID: LIB35-021-Q1-E1-D10
agaaggatacggctgcgagaagacgacagaagggtacggctgcgagaagacgacagaagggtacggctgcgagaagacgacagaaggggttacggataaaataatctcgacggaaggacaaagagttggtattaaaaaagctttggtgttttacaccggaaaagctcctaaaggtactaaaaccaattggatcatgcatgagtatcgtctcattgaaccttctcgtagaaacggaagcactaagttggatgattgggttctatgtcgaatatacaagaagcaatcaagtgcacaaaaacaagtttacgataatggaatcgcgaatgctagagaattcagcaacaacggtacttcgtccacgacgtcgtcttcttctcactttgaagacttccttgatcgtttcaa

SEQ ID NO: 17468 - DNA, 412 bp, Arabidopsis thaliana
  unsure at all n locations
  Clone ID: LIB35-021-Q1-E1-B8
ctcagcgccgcgttttttctctcctcatcctctcgatgaattcctctcaagcttgcttcttccatttttctcttagaccaatctcgctttcgcatccctcctatgccttcctctcgaaacgagacccatttctgtgttctcaacccagaaaatgccttactacgaatttgaatatgtcaagaacganacaagggcattctatacaaatgaacagaagacatcttcttatgaaagaaaggaagagtttttcgataaattattccgataagttcagagatgattctatgagtagcgaggagatgcatacagatgctttggatgtggagattattccgccagattcacaggacattcgtaattcacagaactctgctgtctccaacacactacaggatgatanggcaaagtcttt

SEQ ID NO: 17469 - DNA, 396 bp, Arabidopsis thaliana
  Clone ID: LIB35-021-Q1-E1-E5
gccaaaagaaaaatggatatgtcgcttgcgttatcgacggcaccaatgagtaggacgattatctctgccacgaggcggtcccaagtttcacaacctaaagctaagaaagtcaagccggcgaataagcggccaacgatgtcgacaagcggtttctccggcggaacgacaaaggagttgacttggaagtgcgtagaaggttgtggagcttgctgtaagattgcaaaggacttttcctttgcaacacctgacgaaatcttcgacaaccctgatgatgttgagctgtatcgaagcatgatcggagatgatggatggtgtctaaactacgacaaagctacacgcaaatgctctatttatgctgatcgtccatatttttgtcgggttgagccagaggtttca

SEQ ID NO: 17470 - DNA, 424 bp, Arabidopsis thaliana
  Clone ID: LIB35-021-Q1-E1-F5
gagacttgtggtcttcccggagatggtttcgtttacgggtttcgctttcgtatttggaattctacttgggattcttgcgatcgttacggcggaagttgtaaggtttttgtatcttctgaagcgattgaatcggaaaagagatcgtcaggaatcgaattcgagttctgatccaaacttcaagagttttgatcctcgccaatccattgattttagtctcaacaaacagggagtgatctggatattggaattagatgaaaatgtaaaagattggatgaaggagaaattaccaaaagagcaaaagaaaatgggggcagcaaaggcgaggatgttcgattttaggaagaaagtgggagagaagtttgaagagaagaaacgtcacgttgaggaaaaaagtagacagattgttgaaaagatgagaggacct

SEQ ID NO: 17471 - DNA, 478 bp, Arabidopsis thaliana
  unsure at all n locations
  Clone ID: LIB35-021-Q1-E1-G12
ctgtttacgcctgcttgtaccgccccgagaattcccgagtcgacccacgcgtccgtacggctgcgagaagacgacagaaggggaagagagggagattagggttttttgggtttaggaggaggagagcattgaaagggaaaacagagtttggtagaggtagttatgtgttcccatcttctgtnnnnnnnnnnnnnnnnnnnnnnnnnnnnnnnnnnnnnnnnnnnnnnnnnnnnnnnnggtttggttatgatgatactgatggtattagttgcagccaaagcagcaggttttgtgatgtgaagatctcaagcattagtagaacaggcagcttctctactctgcctgcaccaccttcttcttcttcaaagtctcacttttggacgaatgtgtatgcaggactaaagcaagtggttccatggaagagcaagaagactacagtttgagattctgccatatcaaagattcnaaagattaaaca

SEQ ID NO: 17472 - DNA, 428 bp, Arabidopsis thaliana
  unsure at all n locations
  Clone ID: LIB35-021-Q1-E1-G2
actaggccaaattttggagacgctctttctctttcatagagagagagtgagaaagttctgatacggcggcttctcactgtcatctagctgtaccactgacgataaatctctctcttcctctaaatcggttaaaaaattcattcccttcttggattgctctgttttcttcggcggttcttgcagctccattgattctctgtttcctctgctacagttaacttatacttgcagattctcgcgttgatagtaaaaagatggtgaagcttttggagctgttcataacttcatcaaaaccagtcgttgagattctgttgataacatcagtcggattttatatggctctcgatggagtcaatctcttggtcatgatgctcgtaaatatctgaacaacnttgtcntccaagtgtttagtccttcgcttantggaa

SEQ ID NO: 17473 - DNA, 433 bp, Arabidopsis thaliana
  unsure at all n locations
  Clone ID: LIB35-021-Q1-E1-G4
caaaaaaacattttttctctataaatcctttattattgttataaaaactccgatggatcggcaaaattccgatgacatcatgagatttctcgatggaatggctagctccgacgacgttcttttcggttttcttgacgaaggaaaccagtcaccggaagatttctccgtaaacctcaacgccggcgaagatgacggtgacgaagacgacaataataacaattctgaagataacaaagctttttggcaggaacacgaacaacttcttcaggggacactgtataggacaagttccattgaagacaaagattagacaagctacaaaagaagcgttggaacaagttaaatctaagggtccttattgtgtttgccggcgaacagtggacggcggttgccggagttgcttacgtggcgaaatctctaagacncctaagag

SEQ ID NO: 17474 - DNA, 424 bp, Arabidopsis thaliana
  Clone ID: LIB35-021-Q1-E1-G5
agctgtggaagaaaggccaaaccccatgtttcattgcttgtactacactcgtcgaagggttgaggaaatcaggaagaacagagaaagcgtcagggtttatggagaagatgatgaatgcaggaattcttcccgatagcgtgacatttaacttgcttcttcgggatctctgcagttctgatcattctactgatgcaaacagattgagacttttggcatcaagcaaaggatatgaacccgatgagacaacgtaccatgttttggtttcggggttcacgaaagaagggagaagaaaggaaggagaagttctagtgaacgagatgttggataaagatatgttgcctgatatctttacatataatagattgatggatggcttgtcctgcactggaaaattctcaaggaaacaagtccggatgttgtaacc

SEQ ID NO: 17475 - DNA, 425 bp, Arabidopsis thaliana
  Clone ID: LIB35-021-Q1-E1-G7
gttgagacgaattgaaaaggaaccagaacaactactatcaacggtgatcgatttcgccgggaacggagaagaaaaccctagatatggcggagaagcttgcgccagagaagagacacgatttcattcacaatggtcaaaaggtatttgagtgggatcaaaccctggaagaagtgaacatgtacataactttgccgccaaatgttcatccaaagtcattccactgcaaaatccagtcgaaacatatcgaagttggcatcaaaggcaaccctccctatctcaatcacgatcttagtgctcctgtgaagactgattgctcgttctggactctagaggatgatataatgcacattaccctgcagaagagggagaaagggcaaacatgggcatcaccgattctgggacagggtcagttagatccttacgcc

SEQ ID NO: 17476 - DNA, 431 bp, Arabidopsis thaliana
  unsure at all n locations
  Clone ID: LIB35-021-Q1-E1-G8
gaaggaaaaggaaacgtgggagaaacggtacaagacttaatggcggaggacaaattaagagatcaggatcagggtcaagtagaagaagcatcaatggagaatcaaagaaactctattgaggttggaaaagttggaaacgtagaagatgatgccaagtcatcatcatcatcaagctnnnnnnnnnnnnnnnnnnnnnnnnnnnnnnnnnnnnnnnnnnnnnnnnnnnnnnnnnnnnnnnnnnnnnaagggttttgtgagggtctagtgaggaacatgatagctcaacaagaggagatgcataagaaactcctggaagatatggtgaagaaggaagaagagaagatagcgagagaggaagcttggaagaagcaagagattgagagagttaacaaaagaggtagagattagagcacaagaacaagccatggcta

SEQ ID NO: 17477 - DNA, 515 bp, Arabidopsis thaliana
  unsure at all n locations
  Clone ID: LIB35-021-Q1-E1-H1
ctggtnccctggacgcacaggtccggaactcncgggtcgacccangcntccgtacgtgctgcgagagacgacagaagggggcacaaaagatgtgttagtagaagaagatnnnnnnnnnnnnnnnnnnnnnnnnnnnnnnnnnnnnnnnnnnnnnnnnnnnnnnnnnnnnnnnnnnnnnnnnnnnnnnnnnnnnnnnnnnnnnnnnnnnnnnnnnnnnnnnnnnnnnnnnnnnnnnnnnnnnnnnnnnnnnnnnnnnnnnnnnnnnnnnnnnnnnnnnnnnnnnnnnnnnnnnnnnnnnnnnnnnnnnnnnnnnnnnnnnnnnnnnnnnnnnnnnnnnnccgagagccgtaaaagcgttggtcgagaaccgattctaaatgagaatgtgacttatgagaatctacttgggagcaacaagcnaattccgaagggcctaaaacccttgatgaaatggtgcaatttcctgttgaaatttgggaaagaanaaagtcataccggctaaaaagattcntttt

SEQ ID NO: 17478 - DNA, 399 bp, Arabidopsis thaliana
  unsure at all n locations
  Clone ID: LIB35-021-Q1-E1-H10
ggctgcgagagacgacagaaggggactcaccacataaagtaaaagtctcatctcttcataaaatagctttaaaccaatcaagtagagtttcttctnnnnnnnnnnnnnnnnnnnnnnnnnnnnnnnnnnnnnnnnnnnnnnnnnnnnnnnnnnnnnnnnnnnnnnnnnnnnnnnnnnnnnnnnnnnnnnnnnnnnnnnnnnnnnnnnnnnnnnnnnnnnctctaaatccttccaaaatcttggtatctcatctaacggttcagatttctcctatccatcaaatttcactgccaagaagaacctcactgcttctcgagctctctcccaaaacgggaatatcgaaaaccctagaccaagcaaagttcaagaactgagtgtgtacgaaatcaacgaattaag

SEQ ID NO: 17479 - DNA, 115 bp, Arabidopsis thaliana
  unsure at all n locations
  Clone ID: LIB35-021-Q1-E1-H11
ctgcgagaagacgacagaagggtacggctgcgagaagacgacagaagggtacggctgcgnnnnnnnnnnnnnnnnnnnnnnnnnnnnnnnnnnnnnnnnnnnnnnnnnnncggcc

SEQ ID NO: 17480 - DNA, 419 bp, Arabidopsis thaliana
  unsure at all n locations
  Clone ID: LIB35-020-Q1-E1-G9
aaagtcttgaatatttcatctatatatacctaagaaagaaaagagttaaagaagtatattttcgattcaaagaagaaaaatgaattctcaccagaatcaaaccggagtgcaaaagaagggaataacggagaaaatcatggagaagctaccaggtcatcatggacctactaacactggtgttgttcaccacgagaagaaagggatgacggagaaagttatggagcagctgccaggtcatcatggtgctactggtaccggtggtgttcaccacgagaaaganaggaatgacgganaaanttatggagcagctgccaggtcatcatggatcacaccanactgggaaccaacacanctatggtactactancactggtggtgttcaccacgagaaanaaagtngtgccgaaaaagttatggaa

SEQ ID NO: 17481 - DNA, 477 bp, Arabidopsis thaliana
  unsure at all n locations
  Clone ID: LIB35-020-Q1-E1-H1
ggtttgccttgcccacgnccccggaaaatcccgaatcgacccacgcgnccgtgaaaacgacaaaagggtacggntgcgagaagacgacagaagggtacngctgcgagaagacgacagaacggggaaatttgagtaccaagagagctctttttcatcctaaagagatcttcaaatttagatttcaacacataaaagttggtgacattnaanaatgaaggaaaggaantgtgcagaagctaaggtttaagagaccccactcctcccatttcgagtttttgggtatcnttgaacatttgggagtgtgtgtttttgggggtaataggatacaaaacttaaaagctgtttgttttgtttgtactgttttgttcttgggtttgtctcgtactaatcaagtaaaacaaatgtctcgtactctangactctctctttctaaattgggattagatgaaattacaccatatattttggntgaaaaac

SEQ ID NO: 17482 - DNA, 461 bp, Arabidopsis thaliana
  unsure at all n locations
  Clone ID: LIB35-020-Q1-E1-H11
gcgtccgtacggctgcgagaagacgacagaagggcaggaatgaacaacaatgtcaaaaccgtggttaagtgtgattttcttccttatggtatcaattttcaaagcggagttgccacggggagattctgcgatggacgagtccctgccgatttgctagccgaagaactgggaataaaatcaattgtaccagcatacctagatccgaatctaaaatcgaaagatcttttaaccggtgtatcgtttgcgtccggaggttctggttatgatcctataacaccgaaacttgtggcagtaatatcattagaagatcaattgagttatttcgaggagtacatagagaaagtgaagaatatagttggggaagcaagaanaagacttcataagtagccancagcttaatcctaatgggtcncaagcaagcgacgacntancaatacatactatactctacgtgcaaagac

SEQ ID NO: 17483 - DNA, 509 bp, Arabidopsis thaliana
  unsure at all n locations
  Clone ID: LIB35-020-Q1-E1-G6
ctggtttccctgggccctaccgatccgganatcccgcggtcgacccacgcgtccgcccacacgtccgtacggctgcgagaagacgacagaaggggggggtcgcagtgaccaggcccgggcgactgtttaccaaaaacacaggtctccgcaaagtcgtaagaccatgtatgggggctgacgcctgcccagtgccggaaggttaaggaagttggtgacctgatgacaggggagccggcgaccgaagccccggtgaacggcggccgtaacaataacggtcctaaggtagcgaaattccttgtcgggtaagttccgacccgcacgaaaggcgtaacgatctgggcactgtctcggagagaggctcggtgaaatagacaagcctgatctatcacgttggtcactcaaatacaatgcttttggtcaagacattaagtattcttggcttgctcgtaatcttcagcctactcctaatcagaaaatccattgggagatctcttgaaggtcttcctaat

SEQ ID NO: 17484 - DNA, 433 bp, Arabidopsis thaliana
  unsure at all n locations
  Clone ID: LIB35-020-Q1-E1-H4
acagaggctagagagaatgggatgggaataagcttgtttcgcaggttatcagaagcccatcctcaggcaatttcagtgttacaaaaccaggtaccgaatgtgtcgaggtgttatggaactatcaaatgccttgatatatggagacagattatgctgcggttctgctgaagtagctgatgccacacttgtgctttctacctccagttctacttcgccatggcttaaaaaggttctggagccaacaagaacagttgtatttgttaatacagatatgctgcgtgcttttgaagctanggatcagaatgcgatcaacaatccagttgaagcttccataatagctgagattgtagaggagctagttnncaatggaagtgggctaagtaaagatattgggntcattactccttanaactcacaaagccaaccctcantc

SEQ ID NO: 17485 - DNA, 424 bp, Arabidopsis thaliana
  unsure at all n locations
  Clone ID: LIB35-020-Q1-E1-H5
tgttagaggtagttgccgtgatttgcattctggtcctgtgagtttgcttcactggtcaggtagtggtaagccatggttaagactcgattccaagcttccatgtcctttagacacattgtgggcaccttatgatttgtataaacactcccattgatgccaatttccagttcgacatattcatggtcatggggactaaaccgaagatagcagagttgcaatggtggttttcaactggaaacaactatgttgaagattgagtaaaccctgccggnacagagtgctatagtagtattgcttcggacagttcgaccagaccgttagacacaatttagaagagtggacttccgttttaagtgttgtnccggcggttaaatatgttcctgtggggaagaaanaaaataaanattatagttaaggtcattcc

SEQ ID NO: 17486 - DNA, 455 bp, Arabidopsis thaliana
  unsure at all n locations
  Clone ID: LIB35-020-Q1-E1-H7
gcgtccgtacggntgcgagaagacgacagaaggatacggctgcgggaagacgacagaaggatacggctgcgagaagacgacagaaggggaccgaggaagatgatgaagtggtcgatcgttaagagaatccccgtctatggaggttccttcatttctatgaaacatatgatgttagttccagctgatttgagctggagctgctcgttctctggtatgcactctttgataaacactggagaagaagacgaggaagaactcttgaagaagatcgttaaccatagtgaaagtggttcaaagatcatcagcaaaatcgattatacgaatcttgttgagaagtttacaagagatggaaatctctctggagcatatgacttgttacagtctttacaagaaaagaacatatgtttgcctatttcggttttcaagaaccttcttgcagcggcgggtgagctgaa

SEQ ID NO: 17487 - DNA, 491 bp, Arabidopsis thaliana
  unsure at all n locations
  Clone ID: LIB35-021-Q1-E1-A1
gcacagagtccgggaactcgcgggtcgacncangcntccgtacgtgntgcganaaaacgacgatgcagagtttaacgtcaaacgaagttgcgggtttggcagttggggctctgcttcttggtgccaccatcgctgctcctaaagttgatgcttttatcgctgcttctcagagaagatctcttggcatgtgtcgaaaatgtggagatcttaagaatgtagcttgtggccgttgcaaaggaacaggaacaatcaaatcaggaggattctttggtttcagtgactcatcaaacacaagatcagtggcttgcgataattgccaagccaaaggttgtttcccttgccctgaatgctcaaaatcttgaccattttctcggtattttatagttgtttcatcttcttgacactatgataagtgtaatcggtccattggtaatgggtaatgttaaagttgaagaatgtcctgtttaatcgagaaatctcttaatccaant

SEQ ID NO: 17488 - DNA, 178 bp, Arabidopsis thaliana
  unsure at all n locations
  Clone ID: LIB35-021-Q1-E1-A10
ggcgagaagacgacagaaggcggagaagaaagggaagaaggattgtatcattatgtgaaggggataattgacggatatatctgttcagtaactagggattgaatttgtttggatacccgctttccgaatgtatctcttgggccnnnnnnnnnnnnnnnnnnnnnnnnnnnnngcggcc

SEQ ID NO: 17489 - DNA, 238 bp, Arabidopsis thaliana
  Clone ID: LIB35-021-Q1-E1-A12
ctgcgagaagacgacagaagggtacggctgcgagaagacgacagaaggggacggctgcgagaagacgacagaagggtacggctgcgagaagacgacagaagggtacggctgcgagaagacgacaaaagggtacggctgcgagaagacgacagaagggtacagctgcgagaagacgacagaagggtacggctgcgagaagacgacagaagggtacggctgcgagaagacgacagaaggg

SEQ ID NO: 17490 - DNA, 296 bp, Arabidopsis thaliana
  unsure at all n locations
  Clone ID: LIB35-021-Q1-E1-A2
aggagtcgagagagaaattagccatggcgaccagagctttgctcgccgttatatatgcgtctccgaatcgctgctacatctctccgagcaggatcaaaatccaatctttaacttgttcttcttcaagtcattattaccaaagacagagtagaaaaaaccacagaatagctcgaagttactcgtctgactcggattcctccgttcttcagccgccggatgtggcccgtcttgctcagacagctcgaatctccctaacccggcggagatagangaatgtnaaactaaaattctcgagt

SEQ ID NO: 17491 - DNA, 424 bp, Arabidopsis thaliana
  unsure at all n locations
  Clone ID: LIB35-021-Q1-E1-A6
ggggaaaagatcaatttctctctcttctctctcttcaattattcagagagaggaacacgatctttgtttctccatccggtttgtttactaagttttgtctctggtatggttcagctttgtctccggcgaggtccggctttgtttcggctatctgttgccgctttttgttttttctgttgaataaattatgcgatctatgttagtgttgtggttttaggtgattcgtctttgcctaaacacaattctctccaacataagattgatgaatatgatgcttgagttcgtgaaccgttgacgtttaattgggaagattttgaagttgaaattccatgaagttgaaaaattgttttaaaagctttggaattgacaattgccaacaaccggattcaaaatgcatgtccccggcnttctgggttcaatggaa

SEQ ID NO: 17492 - DNA, 413 bp, Arabidopsis thaliana
  unsure at all n locations
  Clone ID: LIB35-021-Q1-E1-B10
gcgtccggcgagaagacgacagaaggggacagaggaagagaaaacaaacctttaactgaagaaagagtttgagtatggcagcgtcgaccataggtagaggttcatcggaggataagccggggaaaagaacatctccggtgactggcaagcccacaagattccccaactgaatcatcgataccgccggtatagcaacgtatgtaatcccggcgatgtcatggatctttatactcccgttgcaatttgcggtgttacatgaactccaagaatcggtaaataaaggagtcgatatcattaccgaagcttgcaactcactcgtctcgaatcgacaatcgtccatgattggatatcgagtagagagttgcagaacgatgatgtttatgaagttgtaaatatattacaagcnaaaagaa

SEQ ID NO: 17493 - DNA, 430 bp, Arabidopsis thaliana
  unsure at all n locations
  Clone ID: LIB35-021-Q1-E1-B11
gcntccgtacggctgcggaagacgacagaaggggtaccggtaactggtttatggatgagtgctcttggagtagtcggtttagctttgaacctacgtgcctatgattcttggggacgcgatgataccgtgtatcttactggcactggggggaaatctcattaacggaccaggaagttcaaaacttggtttcaagacaacagcagctattataattggacggttggtgttagtgccaccagtaggactaggaatcgtgacagtagcagacaaacttgggttccttcctgctgatgataagatgttccgatttgtgttgctccttcagcacacaatgcctacatcagtgctctcaggagctgttgccagccttagaagctgtggaanggaatcagctgctgtgctcntccgggtccacattttccccancctc

SEQ ID NO: 17494 - DNA, 395 bp, Arabidopsis thaliana
  unsure at all n locations
  Clone ID: LIB35-021-Q1-E1-B12
gtggactgaggctattgcaactacattggcagttccgagcaatcggaggtttatgtttgatgtaacaggaagagtaacactagaaacgacgagatcaatcatcgcatttataatggtgaagacatttcaagggttcagaaaaagtatcaatgtggttcatgaagaggttacagacagaggacgccaagcagttgaatatgttggagccaaatcttctgttataatcactgtatgccttgcgttgtacttgcacatcataagcggctgtgttcggaattctcccataggcgtaagccagcatttttagttcttcagatgaagaagagatcatcgatttggttggatataggataatatttgttaggtacacaagatttatcagctccnttgtttat

SEQ ID NO: 17495 - DNA, 423 bp, Arabidopsis thaliana
  unsure at all n locations
  Clone ID: LIB35-021-Q1-E1-B7
gtagagattgataaaaaaaaaatgagtagctccgattctcctcagcttcacaatatcttcgtctatggtagctttcaagagcctgacatcatccatgtcatgcttaatcgtattcctgagattgtctctgcaacacttcctggctttaagagatttaggcttaaaggacgtttgtatccatgtattatcccctctgagaatggagaagttcatggaaaggtactaatgggattgactaatgatgaacttgagaatgtagattgggttgaaggaaacgaatatgaaagagtgtttgttgaagttgtaagaaaagacaattctgagaagatgagagtggaaacatatccatggatcaacaagaatgatcctgatattggtggagaatgggatttcgaggaatggaaacgattacacatgaagacn

SEQ ID NO: 17496 - DNA, 507 bp, Arabidopsis thaliana
  unsure at all n locations
  Clone ID: LIB35-018-Q1-E1-F4
actggttttctggcccccggtccggaaanncgggtcgncccncgcntncgccgaaaaaaacgacagaagggagccggagatggattcgccaaactgggaactccgtggtntgttgtnaccggaatcaaaatactttcctcatcaccatcggagtcttcaccatagttatccttctgctatggaggacatttctattgactccatttaaactcattacggtgtttttgcacgaagctagtcatgccgttgcttgcaagcttacatgtggagatgtaaggagctttctcacttcaactactagtcttcaaatgaacttaaaagggtagaggggatggaggtgaatgcaaatgaagggggttcgaccacaacacgtggtggcatttattggttgatcttacctgctggctatcttggctcatcattttggggaatggcattgattcttgcatctaccaatctgcttacagcaagaatagctgctgctggtcctggtcctgcttaatcanc

SEQ ID NO: 17497 - DNA, 492 bp, Arabidopsis thaliana
  unsure at all n locations
  Clone ID: LIB35-018-Q1-E1-G10
accgganatctttggtcgacccggncntccgtacagctgaaagaaacgacagaagggggtggagaaacactttagcacggtgcgacaagatggcgagctcagtgacgctgcttctatggagtcttcttcttctcggtacactaagcgctattcaggccaaaaagtctaaggaaaacttaaaggagatcacacacaaggtttattttgatgttgaaattgatgggaaagcagctggtcgtattgtcatgggtctatttggcaagacagtccccaaaactgtagagaatttccgagctttatgcactggggagaaaggaatangtaagaatgggaangcgctccattacaaggggagttcatttcataggatnataccaagctttatgctccaangaggcattttacacatggaaatggaatgggaaggagaatctatctatggggagaattttgctgatganaacttnaaactcaaagcatactggtcaaagg

SEQ ID NO: 17498 - DNA, 435 bp, Arabidopsis thaliana
  unsure at all n locations
  Clone ID: LIB35-018-Q1-E1-G11
agaagggaagagacatcggaaagtactcagagacaacatccaagggattaccaaacctgcgattcgtcgtctcgcgagaagaggaggcgtgaagcgtatcagtggtttgatctatgaagagactcgcggcgttctcaagatctttctcgagaacgtgattcgtgacgccgttacttacacggagcacgctcgccggaaaactgttacggcgatggacgtcgtttacgctctcaagagacaaggacgaactttgtatggattcggcggctaaatcgttcggattgcaatttcggattttgtaaactcctcaatttcaacatctaaggatttcaaatttgtaatttcncaattaaacgatgaatgaattnaaaaaaaaaagaattgtcctcaactttaaattttaancnnatacaagttatcnaaacgtggtttacc

SEQ ID NO: 17499 - DNA, 504 bp, Arabidopsis thaliana
  unsure at all n locations
  Clone ID: LIB35-018-Q1-E1-F12
attgtcngccagccgtccggaatcanggtcgacccnnncgtccgtacggctgaaagaagacgacagaagggggaagaacagagttagttttcaaggtttatccacagatccactgaaatcaacaatggtgaataaagctccgaagaggaaacatgtatcacctgaatctctccttctctctattctcaatgatttgttgtttctaaattctcaaaagcttgactcttgtttccgtagaaaatcgaattcagatgcgtgtagctttatagttagcttaaattttgcaaaagttggaaattttacttcaagatccaatgaaattgctccactgatcaatgaagctgttgctaaaggcaagaactttgatactgggacaagagttggattaaatgttgggcatcctcctaaatccgcattaactggaggaatctcaagtgctttcnccgcctttttgangcatccantggggtactgtcaanacacaaagttnaagcatcaactaca

SEQ ID NO: 17500 - DNA, 498 bp, Arabidopsis thaliana
  unsure at all n locations
  Clone ID: LIB35-018-Q1-E1-G12
ttgtctgccgggtntaccggnntngnnntncgacccggcctccgcccaancgtaagtacggctgcgaggaatacgacagaagggtacggctgcgagaacacgacagaagggtacggctgcgagaagacgacagaagggtacggctgcgagaagacgacagaagggtacggctgcgagaagacgacagaagggtacngctgcgagaagacgacagaagggtacggctgcgagaagacgacagaagggtacggctgcgagaagacgacagaagggtacggctgcgagaagacgacagaagggtacggctgcgacaagacgacagaaagggaaggttttgcaaaaccaacaccgaagattcaacacgatgggacgaagacctgcnagatttaccgtcagnttaaaggaaanccatacccnaaatcacgatactgtcctggtgtnccaaattccaaaatcaggtctaccattttgtatgaacaggaaaagtgttnataattt

SEQ ID NO: 17501 - DNA, 438 bp, Arabidopsis thaliana
  unsure at all n locations
  Clone ID: LIB35-018-Q1-E1-G4
gaaagacgacagaagggggatgtgggcaaaggctacactttgtgtttgcacttgattatcttttcaagacaacanaaaagaagtcagcgacgatatccgtagacgatttttacttgactgcagaaggccaggctgaattgagaaaaaagaatccaggaaatgcacttctagagtatcgtggaaatgcaggaagtcatgatctgaaactttctgttgaaacactagaagccctgtcgaaactgaccaaagaaggcttaaagatgaaggtacctaggtacaataagtctgcctatagtgggagaggtgacagggccgattcatcaacatggcctgaagttgaaggacctctatcggttattctctttgagggatggatgcttggttttaagcctcttccagctgacgttgttaaagcagttgacccacaactgggaggtt

SEQ ID NO: 17502 - DNA, 422 bp, Arabidopsis thaliana
  Clone ID: LIB35-018-Q1-E1-G7
ttgctgccattgttggtgggatacttgaaaaacggagaggcttcggctgctgttttgtccgacatgcaactgagtatatcgcgaggcttcagtattgttatgttgatcagctacattgcatatcttgttttccaactgtggactcaccgccaattgttcgatgcacaagaacaggaagatgagtatgatgacgatgtggagcaagaaaccgcggtgattagtttttggagcggttttgcatggttggttgggatgacactcgttatcgcattgctatcggagtatgttgtagccacgattgaggaagcatcggataaatggaacttatcagtgaagtttcataagcatcatattgcttcctattgttgggaaatgcagctgaacatgctggagccgttatttttgcctttaagaacaagctt

SEQ ID NO: 17503 - DNA, 428 bp, Arabidopsis thaliana
  unsure at all n locations
  Clone ID: LIB35-018-Q1-E1-G9
atggcgaagaagaaggaactgttatcaaaagcaccgtggagaggcgacgacgaagatgattccgataagtttagcaacgcaaagcttaaagtcacaaaggattctgatggtatgtcgaagatgcacgtccctagccgcggaatcaaaaaggaagtctcgctgatgatgatgatgattcacttgagattgatcctcagcttcgttacagcttcaatcgcaactatcagttcctgcaaagtgtattcactatagacactttggtgaagcctcttcctccttcaatggcattcaatgtctctcgcaacttgagcttcttcaaccgcattttcactcaattccttgattctgaaagnattgcaaatgcacaaaaatcnccaagggtnggggaaggaaaaaaaactcccccctgtttccttgaaatatgaacc

SEQ ID NO: 17504 - DNA, 395 bp, Arabidopsis thaliana
  unsure at all n locations
  Clone ID: LIB35-018-Q1-E1-H11
ctgcgagaagacgacagaagggtacggctgcgagaagacgacagaagggtacggctgcganaagacgacagaagggtacggctgcgagaagacgacagaagggtacggctgcgagaagacgacagaagggtacggctgcnagaagacgacagaagggtacggctgcgagaagacgacagaagggtacggctgcganaagacgacagaanggtacggctgcgaaaagacgacagaanggggtccttcttttgtctgaaccaccggaagaactcnacccattgattaaaagattacaactccacaagttaagaccggttttgttccttgggtttaacaaaggacattttttancaaacnttaaattaactcctcntcctcctctcccaaanggaaaa

SEQ ID NO: 17505 - DNA, 428 bp, Arabidopsis thaliana
  unsure at all n locations
  Clone ID: LIB35-018-Q1-E1-H8
aagacgacagaaggggatcacatcctcacacacaaaaataaatcatcacaagaccagagttaaaagagagacatgtcgacttcattcacaatgatcggcggtgaaggtcccaacagttaccgggaacattcgaaataccagggagcactggttatagctgcaaaggaaaagatnaatgaagccatctccacgaaactcgatatcgactttacttcaaatcttgttaacatagctgattttggttgttcctctggaccgaacactttcaccgcggtacaaaccttaattgatgctgtggaaaacangtataagaaagaaagtaatattgagggaatccaanttcaagntttcctcaatgattctcaaacaacgaatttaacaatcccctcaaganacttcccccgggtaaaacggtattcccaatggag

SEQ ID NO: 17506 - DNA, 527 bp, Arabidopsis thaliana
  unsure at all n locations
  Clone ID: LIB35-018-Q1-E1-H9
gaatggtttgcttggcctgccgtccggnatcaagggtcgacccacccgtccgtacagctgaaaagaagacgacagaaggggggggtcgcagtgaccaggcccgggcgactgtttaccaaaaacacaggtctccgcaaagtcgtaagaccatgtatgggggctgacgcctgcccagtgccggaaggttaaggaagttggtgacctgatgacaggggagccggcgaccgaattgctgaagttgtaaaggaaacactgaggaaaatggagatagtgggtgaggaaaagacgaggatgtacaagaaagcgcgaatggggcttgaggaatgcgagagagaagtanaagagaaagcaaaagcaagtggcgggaactgcaaatngnnnnnnnnnnnnnnnnnnnnnnnnnnnnnnnnnnnnnnnnnnnnnnnnnnnnnnnnnnnnnnnnnnnnnnnnnnnnnnaaanatgtttcaantttaaaagcaaacnaaggcaaaaanttggaaccacaagaaaatttggaaanggattt

SEQ ID NO: 17507 - DNA, 407 bp, Arabidopsis thaliana
  unsure at all n locations
  Clone ID: LIB35-019-Q1-E1-A2
tctcactttgttcatctaaaaactcctcctttcagttccaaacaaaaacttctttttattctcacatcttaaagatctctctcatggcgacgtctttctcaggagctgttctcactggtatggcttcttctttccacagcggagccaagcagagtagcttcggcgctgtcagagtcggccagaaaactcagttcgtcgtcgtttctcaacgcaagaagtcgttgatctacgccgctaaaggtgacggcaacatcctcgatgacctcaacgaggccacaaagaaagcttcagatttcgtgacggataaaacaaaagaggcattancagatggtgagaaagcgaaaagactacgttgttgaaaaaacagtgaaacgcantacattgggtaaagaactgaaaaantgcgg

SEQ ID NO: 17508 - DNA, 477 bp, Arabidopsis thaliana
  unsure at all n locations
  Clone ID: LIB35-019-Q1-E1-A3
ccccangcgtcaaataaagctgcgannggtactgctgcgagaagacgacagaagggggataacgaaaagctcgccgagaaaagcacaaaatgggcggggcgttaaatctcctgcaaccctangactcatatcttccntttctcggcaacaattctattagatnaacgcaaccacttattcatctctttcgcttcgatttangaagaagacatgtttcgatgcaattatcaagaaccttttctggattaaccgatctcctgtttaatagaagaaatgaagatgaagttattgatggcaagagaaaacgtctgagaccgggaaatgtatctcctcgtcgtcctgttccgggtcatataacaaaacctccttatgttgattccccttcaaagctccccgggaatctcaaagttggacnttgaagttcatggatnagaaanggtnttanaatgcattganaaccttctgggaataactttc

SEQ ID NO: 17509 - DNA, 490 bp, Arabidopsis thaliana
  unsure at all n locations
  Clone ID: LIB35-019-Q1-E1-A6
ncggtattctgcattcccgggcngccccacgcgtccancaaangcgtccgtacggctgcgagaagacgacagaagggcttagtttttcttccgccatccggtgaatccggcaaagccatctggttgttaaaccagcttcagtccaacagcctccggctattatanaggaggttggttggcttttcactggcggtgttggctccctcagcaacgtcggccagttttctctccggcaacnatggctccgtancaccgtttggctggctcctcttgtntgcggcatgttttcggctttctatgcgatggtgtccgcttttgtctctggtcattccaccgtcatctttccggtggttttggccagttatgtaccggtgttagatccggtttatttgtttctgttttacttttaataattctcattganatgtgttggggataanaatgattncantctcgatttcattgcttctaaccaatccaatcccntttt

SEQ ID NO: 17510 - DNA, 431 bp, Arabidopsis thaliana
  unsure at all n locations
  Clone ID: LIB35-018-Q1-E1-B9
cgacagaagggacaggcggagaaatcaaaaaaccaaaaatccaatctttggattcttacttctacgatttgtgtgtttcctcaaacccaaatgtctcgtctcccgattttaatcgcttcgtgtctcttcctctcttcactcaccgccgccgtcgtcaccgccgccgaatccgatactccgacggcttattcactcctccaaagctacaacttccccgtcggaatccttccaaaaggagtcgtagcttatgatttagacacaacaacaggnaaattccatgcgtatttcaacgattcatgtancttcaatcctgttggntcctaacaattgaattncaaatcaacaatcaatgggtacatctcccgangaaacaaagctcaanaaaattnactggggtttaaatccaaagttttggtcctggggggttaaaa

SEQ ID NO: 17511 - DNA, 424 bp, Arabidopsis thaliana
  unsure at all n locations
  Clone ID: LIB35-018-Q1-E1-C1
gaaggggattgaaactgtatctagtttaccaatggtgcgatcggtttacggcccaacctcggtgaacaagaggaagctgatgggattagggaatcttcaggagacaaaagatactgtggagagcgtaaaacggttaaacagaacaactaatggagttcttgatctgaaccttccggctcaagagaccgaaatcgaggaaaaatatcattgtgaagagaactcaaacgtttggttaatgaacttgaagaatcataaacgtctcattgaggttcctttcaagccttttgattttgaaggactagctgaaaaaatcaaaaagagcgttaaagaaaatttcgacaagtgcgtgagatcggattgcttgctggaggttgaccctaagatnatagaacgattgctancggctgtttaattcncaaataat

SEQ ID NO: 17512 - DNA, 431 bp, Arabidopsis thaliana
  unsure at all n locations
  Clone ID: LIB35-018-Q1-E1-B4
tataagacctagagtctctctgtttcgcttttcataaatcttgaagaataaatggaaaaagcttcaaacagcaacaagtccacgaaattctcgaaaatgcttcaaagagcgatgtcaattggtcacagtgcggcgccgtttagtccacggagagattttcatcagcaccgtacgacttcgacggcgaacagaggaatcttcttctccagtccgttggttcctacggntgctagagttaggagaaatacaaaatacgaagccgtttttgccgaacccacttcgcctaaagtctcctgcatcggtcaggtcaaactcgctagacctaaatgtccggagaagaagaacaaagcacctaagaatctcaaaacggcatcgtccttatcgtcttgtgttattaaagaagaagacaatggaagctttcgaaactnaaa

SEQ ID NO: 17513 - DNA, 505 bp, Arabidopsis thaliana
  unsure at all n locations
  Clone ID: LIB35-018-Q1-E1-C2
atggtntctgggcccccggtccggaanaccgggtcgacccncgcgtccgtagaaaaaaagacgacagaagggggctaactcccaaaaaaaaaaatggcggcgtttttgcaaacgaacatcagtctgaatgcgatcaagatcgtcccggggaaatacagttctctcaccgatcatcagtttcgtgcgccgtatcgaattaggtgcgccgccgcttcacctgggaaaaaacggtataacatcgctctgcttcccggagacggtatcggtccagaagttatctctgttgctaagaatgtgcttcagaaagctggatctctcgaaggactggagtttgatttcaaggagatgcctgtcggaggagcagccttggatttggttggagttccattgccggaggaaactttcacggctgcaaaactatctgatgccattcttcttggagctattggagggtacaaatgggacaagaatgagaaacatctgagacctganatggtcctgttta

SEQ ID NO: 17514 - DNA, 523 bp, Arabidopsis thaliana
  unsure at all n locations
  Clone ID: LIB35-018-Q1-E1-C4
gaactggttttcctgggcccccacggtccggaaaancccgggtcggacccncgcgtccgaangannaaagaaagacgacaagaaggggttttacggtcctttccgtgaagccctgggactcaaacccgcgtttcggagacaagaaaacgtatcagatgaacccagcaaactacagagaggcattgattgaggcacgtgaagacgaggctgaaggagcagacattctcctggtgaagccaggtcttccatatttggacatcatacggcttttgagggacaagtctccattaccgattgctgcataccaagtttctggagagtactcgatgatcaaagcagggggagtcctgaaaatgatcgatgaagagaaagtgatgatggagtcactgatgtgtttacgcagagctggagcggacatcatcctcacgtacttcgctcttcaaagctgctacttgtttgtgcggcgaaaaacggtagaatagacaacaaagactgtgntttaaactggtttgagtaaaccggt

SEQ ID NO: 17515 - DNA, 450 bp, Arabidopsis thaliana
  unsure at all n locations
  Clone ID: LIB35-018-Q1-E1-C8
gcgtccgtacagctgcgagaagacgacaaaaggggataagccgcaagtctctctctataaacaccgccattgattagcttcctctctatttttactctcgtcacgtcctccacttttgggtcattattacttctcgaagctcaccaagatcttgaatttgccgacctctcaagattcttgatggtaaaagcatacagacaagagcatgtttacaagcatccgtgggagcgggtgagtgctgcttcatggaggaagtttgcagaccctgaaaacaaacgcatcctttctcacatccttgaagtcgatcccttgaacaggaaactcgacactgagaccgggaaactccacaccacgcgtgctctcaccatccatgctcctgggtccatggtttctccataggatcattgggtcaggacatctgtcactgtgttgaatcaacagttgtagatn

SEQ ID NO: 17516 - DNA, 496 bp, Arabidopsis thaliana
  unsure at all n locations
  Clone ID: LIB35-018-Q1-E1-D9
tctgcncgtccggtcttctnaggtcgacccnnccgtccgtacanctgnaagaagacgacagaagggggtcggagattaccaacaagagctctctccaatcgtcgtctctttgatatatggcgtctcagcctgcaggtggcagtcctcctaaaccttgggaaaaagaaggaaatacatctggtcctaatcctttcaggcctccttctaatactagcacggctggttcagttgaggcttctggcacagctaatcctggtgaagtagttcctccgcccgtgaacaggcctaatacagctgctaatatgaattcactcagtagacctgtaccggctagaccttgggaacagcagaattatgggaacactatggggggaagttatggttcaaatctaagtatgaactccgggtatgggtcaagtncataaggttcaacattaagtgggtatgggtcaacaaatngtggtggganattttgaagtttttccttttanaaggg

SEQ ID NO: 17517 - DNA, 485 bp, Arabidopsis thaliana
  unsure at all n locations
  Clone ID: LIB35-018-Q1-E1-E10
tgctctgncctgcccgtccggaaatcataggtcgacccgnccgtccgtacggctgaaaanaagacgacagaaggggaaatcacagaacaccaatcggnataatcacacgagaacaaaacttgttaatcaggagaagacgacagagagagagaaggagagagatcttccatggcggattcggaagcagataagccactgagaaaaatctcagccgctttcaaaaaactagcaatcatcgtgaattcaccgaatccggaagttcctgtaacgcaattctctcacgcttgctctctggcctcgcctctctttggttgccttggaatggcttttaagtttgcggaaatggactatgttgccaaggttgatgatcttgtganggcgtcnagttcgatatccacattaatggtaatgatggncaaaagatattgaggcaaattgtgttaaggaanctggtantcatacgagaaaacctttnaggggttaac

SEQ ID NO: 17518 - DNA, 509 bp, Arabidopsis thaliana
  unsure at all n locations
  Clone ID: LIB35-018-Q1-E1-E12
aatggtttgctctgcctgccgtccggaatcaaaggtcgacccangcgtccgtacagctgnaagacgacagaagggtacngctgcgagaagacgacagaagggggcttctgtggctaacaaagagcaaacaaacacttagaagaaactaagaatactctcatcaaggcgatatagaaaaaaatggagagcaaagggagctggacagtggctgatgccgtagactacaaaggacggcctgccgacaaatccaaaaccggtggttggatcactgccgctctcattcttgggatagaagttgtggagaggctatcaacaatgggaatagcagtgaatttggtaacatatttgatggagacaatgcatctcccaagttcaacctctgccaacattgtcgctgatttcatgggcacttccttcctcctaagcttgctcngtgggtttctcgctgactccctcctccggcgtttnaaaaacatcngaatttctcaaacaatcaaactctgggaatg

SEQ ID NO: 17519 - DNA, 500 bp, Arabidopsis thaliana
  unsure at all n locations
  Clone ID: LIB35-018-Q1-E1-E2
ctggccncccggtccggaaaancgggtcgaccacgcgtccgtacagnagcgagaagacgacagaagggggacgttcgaaattccgagggagaggaatcataccatggaatcgcaccacgcgtctctaggtcgccgtactttggaagagattcgtcaaaagagagcagctcaaaggctaagcaaagcttcttcaggtccagatcttagtgaaattcccaatcctgccgatttcccagtgatcagaaaatctgagagcggaaatcgactttctgagacagatgttggtgctttatattcccagcttaaagaactgcagaagaagaatgcagaaatggaggagcgcaacaaaattttgtcttcaaagcttcaaacgaaggaagttgagaatgaatcacttgagactcggttgaatgtgctggaacaaaacacagtgccatctttgagaaaagccctcaaggaaattgcaatggagaaagatgctgctgttgtttacganaagg

SEQ ID NO: 17520 - DNA, 430 bp, Arabidopsis thaliana
  unsure at all n locations
  Clone ID: LIB35-018-Q1-E1-E5
aagacgacagaagtagaagaaaccaaagcganatcaanaagctcancanttttccagatttctctaattgacgatggcgctttgtgctactactcaaaggactatccgtatagcggcgacgctccggcgtgttgctcgacctttcgctaccgacgcggtggttgantcggattacaagcgtggtgagatcggtaaggtctccgnaatcccagangancatctttctngcaaggtgataatatactcacctgctagaacagctacccagtcangatctggaaaactcgnnanatggaagattaanttcgtctctancttaaagtgggagaatccgttgatgggatggacttctacgggtgactccnaagctaatgttgggtgactctgctcntgcttttgattctgaagaactgcaantcttttgctgagc

SEQ ID NO: 17521 - DNA, 431 bp, Arabidopsis thaliana
  unsure at all n locations
  Clone ID: LIB35-018-Q1-E1-E7
aagacgacagaagggggatcaacaaacaaacacatcacaattctcgaacttcgccggagaatgatggaaacagctctgctccggtactgcgtcaacttttccggtcacaagaaaatctctgctcatcaaagaagtaatagtgagattccgaaaacgagtccgggaggatgcgaagacgagtggtgtgctagggttttgagtagaagatcggtaatggcgtcagggttggtctcctcgacgacggctttagcatttccaagggaaggattggctgtcgttaaacaaggtcttctcgctgggagagttcctggtctgtccgaacctgatgaagaaggttggagaacataccgtagaccagacgagaagtcangaaggcatggtgttggttggagtcctaataacccttacgccntttcggttcctcaagattg

SEQ ID NO: 17522 - DNA, 505 bp, Arabidopsis thaliana
  unsure at all n locations
  Clone ID: LIB35-018-Q1-E1-E9
aagtggtttgtttngcctgccgtccggaatcangggtcgaccgacccgtccgcggangcganggcggacgcgtccgtacggctgcgagaagacgacagaaggggacacactcaaatatctctccaacactaaaataattgtaccgactctctctctctctctctccgtaacaaaaaaatcaccaatggcaaaacaatatctctttgtactcctctcaatctcctatctcttatcactggagctcacggcggccaccgcagcctcacagaccggagcttccaaaaaagccataaacttcatccaatcttcttgcaaaaccaccacataccctgccttatgtgtccantcactctccgtctacgcaaacgacatccaaacaagccctaaacgtttanctgagaacgctatagccgtgacactaagccgagccaatccacgaagctctttgtctcgcgtntaanacgtntgaaaggggtttaaaaacgcgaaggttaaancatcaaag

SEQ ID NO: 17523 - DNA, 476 bp, Arabidopsis thaliana
  unsure at all n locations
  Clone ID: LIB35-018-Q1-E1-F10
gtccgccngcctccggaatcaaggtcgacccggcctccgtacggctgnaaagaagacgacagaagggggaaggtttcgtttcgtggggaagaagatgaagtcgcttgtggctcatttctcaacgcctttaatcaccgctagattagttcctagatgtatcatccatcgagcttcaatctccgccgtctctttttccaccgtccgccgtcgattttctcctctcaccatggcctcagcagctcagtcttcttctcaggctgtgtcttacgggagtggcaacagtgatacagatgtttttaaattgattcaagctcacgaggagaaggctgctcgtctttccccaatcgaagaaatccgaactgtgcttaatggtaacatatgcggtatgctttccactttttctcanaagtatgaagggttatccttcaaggtcaatgggtgaatttgcatgtgaagccgangggtctcccaatctg

SEQ ID NO: 17524 - DNA, 516 bp, Arabidopsis thaliana
  unsure at all n locations
  Clone ID: LIB35-017-Q1-E1-H12
cggtttgccctggncctccgggaaatccanaagtcgggccaggcctccgtanggatgcnaagaaacgacagaaggggggagagaagantagtttgataatcttgngagaaacataatggctgcttcagtgatgctatcttcggtgacantgaaaccanctggtttcacggtgganaagacggcggctanaggattaccgtcgctcacaagagctcgtccctccttcaaaattgtcnccagtggcgtcaagaagatcncgaccgacnagcccttcggaattaacggcagcatggacttgacggacggcgtcaacacctccggcagaaanggcanaggatacggtgtttacaagtacgtcnacaattatngagctaacntcgatggatacagtcctanttacaacgagaacgaatggtcaaccaagtggtgacntgttcaanggatgaatcancggattggcaanttgggcggtaactctcncccggaattcctgccggaagtgctcctctgtgtaca

SEQ ID NO: 17525 - DNA, 532 bp, Arabidopsis thaliana
  unsure at all n locations
  Clone ID: LIB35-017-Q1-E1-H4
ttnccctgggccctacgaatcgcnaatcgacccacgcgnccgagacgacagaagggaacccaaaaaaaacgattttgagaaaaccatctcactgattagcaagatgtcgtcggctcgttctgcgatcacaaagctaaagctggctcgatcctttggggagaggcagattggtgcatcgcgttcggtggtatcgactcgaggaccggcgattcggtacttcagtgacgataaaggtcgtgtgctcagcgaagaggaacgcgcgaaagagagcatgtatatccagaaaatggagagggagagactggagaagaaggagaaactcgagcaagataagctagatggtgagaaaggaagtgcaacaagaaacctgagacaacaagccatgagtttacaccacagtatacangaatccggtcataanggaagccantantgaaaacnataatgcctttgaccaaggtcccccctggnatgagnaattcttgtccntggncaaagatttttaancctccggagtgtggggttggggtgc

SEQ ID NO: 17526 - DNA, 524 bp, Arabidopsis thaliana
  unsure at all n locations
  Clone ID: LIB35-017-Q1-E1-H11
ntggtctgccttgccctggccgtccggcaaatccaaggtcgacccacgcgtccgcccacacgtccgcgagaagacgacagaagggggacccggacagcctaaaatggaacgtacaagccgagatagtccactgccgatgggctatgctaggagccgccgggatattcatcccagagttcctaacgaagatcggaatcctcaacactccgtcatggtacacggcgggagagcaagagtatttcacggacaaaaccacactctttgtcgttgagctcattttgatcggatgggcagaaggacgtagatgggccgatatcatcaagcccggtagcgtcaacactgacccagtcttcccaaacaataaactgacgggcacagacgttggttacccangtgggttatggttccgacccgttgggttggggattccgggtaacccggctaaactcaaaggatttaaggaccaaaggagattnaagaacgggaaggtttgnctaatgttgggaattatgggttccttggtc

SEQ ID NO: 17527 - DNA, 567 bp, Arabidopsis thaliana
  unsure at all n locations
  Clone ID: LIB35-017-Q1-E1-H8
ncggtttcctgggccctaccgaaccggaaatcccgggtcgacccacgcgtcngtacgcatgagaagacgacagaaggggacgaaaggaaaatatgagtgaggagaagaggaagcaacacttcgtgctagtacatggtgcgtgccacggcgcatggtgctggtacaaggttaagcctcttctcgaggcgttgggccatcgtgtaaccgtcttagacctagctgcttccggtatagacacaaccaggtcaatcactgacatttctacatgtgaacaatattctgagccattgatgcagctaatgacttcattgccgaatgatgagaangttgtactcgttggtcatagctttggaggtttgagtttaaccttagccatgggataaattttccccgataaaatctcngtccccggtccntcgtgaactggnaattcaatggccccgacaaccanaccacctccaacnatccgtttccgtccaanggaaaaaagttttgccaaaccngggggnngggcancccagaaagggntnggattgggggctccctgaacccccccaanaacaataa

SEQ ID NO: 17528 - DNA, 429 bp, Arabidopsis thaliana
  unsure at all n locations
  Clone ID: LIB35-018-Q1-E1-A1
ggctgcgagaagacgacagaaggggggggtcgcagtgaccaggcccgggcgactgtttaccaaaaacacaggtctccgcaaagtcgtaagaccatgtatgggggctgacgcctgcccagtaccggaaggttaaggaagttggtggcctgatgacaggggagccggcgaccgaagccccggtgaacggcggccgtaacgataacggtcctaaggtagcgaaattccttgtcgggtaagttccgacccgcacgaaaggcgtaacgatctgggcactgtctcggagagaggctcggtgaaatagacatgtctgtgaagatgcggactacctgcacctggacagaaagancctatgaagcttcactgttccctgggattggctttgggcntttcctgcgcaacttaagtggaangcgaaaaaaggccccctcc

SEQ ID NO: 17529 - DNA, 406 bp, Arabidopsis thaliana
  unsure at all n locations
  Clone ID: LIB35-018-Q1-E1-A12
ctgcgagaagacgacagaagggtataccaagatgatacaaaggttttgaaagtctcaccaactgacacagtgttgactgtagcaaagaagatggttgaattccaatcaagctgtgcagtcgtgataatcgaggacaagcttcgagggatatttacttccaaggatatactgatgcgggttgtggctgaaaatcttcctccatctgagactctagtggaaacggttatgactcagaatccanaatctacgatagttgacacaccaattgttgaagctctacacatcatgcacgaagggaaaatttttacaactttcccgttactgacaaaagaaagggattnattgctgtttgtccaatgttatccatgttactcaagctgctgtttccacaaacttggactanatg

SEQ ID NO: 17530 - DNA, 310 bp, Arabidopsis thaliana
  unsure at all n locations
  Clone ID: LIB35-018-Q1-E1-A3
aggatggtggngttaacgaatcaaaganggtcggataaaccaaagtaccatgaccgaatcagaaatgtccgacggagggagaacatgcgttgactcttattattctcagactttacgctagggcaatcatttcgatttgatctccgatgcttttttttgttggtttgttcttttaatttgctagactcttaatgaataatgtatatgatggtgttttggtgatatcgaatgtatcaattgtttctgcnnnnnnnnnnnnnnnnnnnnnnnnnnnnnnnnnnnnnnnnnnnnnnnnnnnnnnnnngcggcc

SEQ ID NO: 17531 - DNA, 469 bp, Arabidopsis thaliana
  unsure at all n locations
  Clone ID: LIB35-018-Q1-E1-A4
gcncccggtccggaaaaacgggtcgacncccgcgtccgtacagcagcgagaagacgacagaatggtacggctgcgagaagacgacagaangggnnnnnnnnnnnnnnnnnnnnnnnnnnnnnnnnnnnnnnnnnnnnnnnnnnnnnnnnnnnnnttctccgataattctttggactgatgaattaaagggaaacgctgagtgtaaatcatacaacagttctaagtcgtgaaaacaaaaaaaagatggcttgtanaggttgtttggagtgtttgttgaagttactcaactttctcctggctgttgctggacttggcatgattggttatggtatcttgctccaaggcaacaaatcaggcagccattcatcaaccgccaagccgcccctgtcactggtgtcccagttgctcctaactttggaccaacgcccaagccgcagtgacccntggattgcacgtatgagggaaaant

SEQ ID NO: 17532 - DNA, 448 bp, Arabidopsis thaliana
  unsure at all n locations
  Clone ID: LIB35-018-Q1-E1-A6
gcgtccgcccacgcgtccgtacggctgcgagaagacgacagaagggggggaagttgaaaatatgaaaattgtaaatgacactgtaatgttgtgtgggaatctgaatgcagatgaagctacgcaggcgacacctgagcctaataatgcagaaccgtatccagactataacctggtggtcacagagagggaaacaatcatggaggttgatgagccggatccagatgatcaagaaatccagaggatccaagactctgttaccatcatctctaaccgtctcaagaaagccataaaggccttgagaaatgaagtcagccccggtcaagcaaccactgtgttacaaatgcttctcaaaatantcaggaacatcattgaacaaccaaatgaaatgaaattcaaaaggtgcgtaaggaaatcctgcaattaacgcaacattctcaactttccagct

SEQ ID NO: 17533 - DNA, 473 bp, Arabidopsis thaliana
  unsure at all n locations
  Clone ID: LIB35-018-Q1-E1-A9
gcgtccgtacanntgcgaggaagacgacagaagggggtcttacgagagaccaaaacgatggagagcacgaagattgctccttcattcgatcgtgccagtgagcttaaagctttcgatgagacgaagactggtgtgaaaggactcgttgactctggaatctcaaagattccacgcattttccatcactcatctgtcgaactagcaaaccctaaaccacttccctcggacctgctacatctcaagacgatcccaacgatcgatctcggaggacgggacttccaggacgcgattaagcacaagaacgcgattgaagggattaaagaagcagctgccaagtggggtttcttccaagtgatnaaccatgggagtttccctcgaacctccttgagaaanatgaaagatggagttcgtgactttcaagagcnaactncctgaaatgagggaaaatttttcaaaccncaattttggaaaaa

SEQ ID NO: 17534 - DNA, 582 bp, Arabidopsis thaliana
  unsure at all n locations
  Clone ID: LIB35-018-Q1-E1-B11
ctgcncgggtctaccggatagnatatntcggccgncccgtccgcccaaacgnaacgtacggctgggataagacgacagaaggggggagacggaanaaaattcgaatcatcagtgtttgtttcctcctctcttaaagcttagcccttctcaggtcattgttcttcaatggcttcgagcaacacgactactggggttgataatacgtttagaaagaagtttgatgtggaagagtttaaggagcgtgctcgtgaacgcgaaaagaaggaatcggatcggtctaaatctcggtccaaaggtcctcctgtgcaaagagccccttttgaagcatagagattatcatgtnnacctaagaatccccgtctgggcaaaacacaagtcctttacaccgggttaaccgccctcctaaaattcaagcaaaggcttgggttaaatttccggttcccnnttttggtgaaattggggtttggtttaaaagaanttccnggnaaaacctaaacttttggggtttaacaattaaaaaattnggggaaaaaaaancccncccaaaaaggggggcaanttttgggggaaatnttttttaat

SEQ ID NO: 17535 - DNA, 497 bp, Arabidopsis thaliana
  unsure at all n locations
  Clone ID: LIB35-018-Q1-E1-B12
ttngccgccgtccggaatcannggtcgacccggccgtccgtacnanctgaaagaagacgacagaagggtacggctccgagaagacgacagaagggtacggctgcgagagacgacagaagggtacctttgacggcgaggttgataaagtgtacttgaacacgccgacaaagattgccatcatagatcatgagaggaaaagaactatcgagttgcaaaaggaaggcatgccaaatgcagctgtgtggaacccttgggacaagaaggccaggagtattgcagatatgggagatgaggattacacaacaatgctgtgtgtagattctggtgctatagaaagcccaattgtgttgaagccacatgaagagtggaaaggaagacaagaactctctatcgtctcctcaagctactgcaacggtcaactcnattcacgtaaaggtcnttaaggggaataccgngtaatatatatgaaatccaacttggaacatcatcaatcttat

SEQ ID NO: 17536 - DNA, 490 bp, Arabidopsis thaliana
  unsure at all n locations
  Clone ID: LIB35-018-Q1-E1-B2
cggcccccggtccggaaaancgggtcgacccncgcgtccgcccaanngtccgcccacgcgtccgcccacgcgtccgtacggctgcgagaagacgacagaaggggcttttagacaaaactagtggcagactgaaaaatgaacgcagcgcttgcaacaaccaccgccacaactcccgtactccgccgtgagacgcctcttcttcattattgttctctcacaacaaaatcgccggtttaccaaattaacagagttagattcggatcttgcgtgcaaacagtcagcaagaaattcttgaaaatctcggcgagctctcagagcgcttcagcggcggtcaatgtcacggcggatgcttcgattccgaaagagatgaaggcgtgggtgtataatgactaagggcgggattnatgttctgaaggctggagaataacattgttgtgccggagattaaagaagattaaggttttgattaaagttgttgccgcggntctaa

SEQ ID NO: 17537 - DNA, 512 bp, Arabidopsis thaliana
  unsure at all n locations
  Clone ID: LIB35-018-Q1-E1-B3
actctcttaagcccccggtccggnannnacgggtcgncccccnccttcgnccaaaaattccntacggctgctanaagacgacagaagggtacggctgccanaagacgacagaagggtacggctgcgagaagacgacagaagggtacggctgcgagaagacgacagaanggtacggctgcgagaagacgacagaatggtacggctgcgggaagacgacagaagggtacggctgcgagaagacgacagaagggtacggctgctagaanacgacagaagggtacggctgcgagaagacgacagaaggatacggctgcgagaagacgacagaaggatacggctgcgagaagacnacagaaggatacggctgcgagaagacgacagaangatacggctgcgagaagacgacagaagggggatttcagaattttgggactaaaggaggacaacnacaaagcncccggaaaaaatccgagaacgacaacaattggcnccttcttcgtcaaccgtctcac

SEQ ID NO: 17538 - DNA, 519 bp, Arabidopsis thaliana
  unsure at all n locations
  Clone ID: LIB35-015-Q1-E1-H6
gtngtcttcttggcccccctaccggtcaaganttcccgggtcgacccacgcgtccgtacngctggagaagacgacagaagggggnnnnnnnnnnnnnnnnnnnnnnnnnnnnncttctcctcaaaaatggcgtttacactaggtggaagagctcgtcgtctagtctctgcaacatcagttcatcaaaatggttgcttacacaaactgcaacaaattggatcggatcggtttcagcttggtgaagcaaaagcaataagattactacccaggagaacaaacatggttcaagaattaggaatcagggaagaatttatggatctaaacagagaagcagagacaagttatgattttctgggatgaaatgagacacaagatttctgaaattcaagagacaaaagtttctaccggagatagaaaagtttaaaagctttggccatagctcaatcaccaaaggtaatggtgataggatgtgcaagattcaagggtatgtccatcttatgttctaggattcaacctggt

SEQ ID NO: 17539 - DNA, 390 bp, Arabidopsis thaliana
  unsure at all n locations
  Clone ID: LIB35-015-Q1-E1-H9
gaaggggttgtccaatttgctcgaggtcagtgattgatatgtctaaaacatggcagagactcgatgaagagatcgaagccactgctatgccttcagattaccgtgacaagaaggtttggatactttgcaacgattgtaacgacacaacagaagtgcacttccacataatcggacagaaatgtggacattgcagatcatacaacacacgagcgattgcgcctcctgttcttcctcaatgacaaaaccaagatnttcccatgtattgcctccagaaagcaagcaagaactttttgttgctaaaaaaactgangcatagattaatgatnatnacanagaaagaaaaagaaaaangantgatgattaatttggtttattggncccaaaagccaa

SEQ ID NO: 17540 - DNA, 418 bp, Arabidopsis thaliana
  unsure at all n locations
  Clone ID: LIB35-016-Q1-E1-A10
cccaaaaaaaaacagaagaataagaagacacaactcttgttttaaatttgagtcccatttacttttgatgctaaataggagagaaaacgtttttgactcacacataacgtagagagacagagagagacaaaaaaaaagagacgggaatattccggcgaagattgagactctcaatatccaatggagaagtattcccggcggtctattctcctttccacggtggtcgccgccgtgttattctctttaattccggtttcaatctctattcccttcatactctttcacgttaatattaattatccaaaaaaaaaagaaaacaggaattggagataaatgttcctggtggagttagtaacttcacgcaactccctaancaaacctctctggctcctcctggctattgcntaaaaaataagaa

SEQ ID NO: 17541 - DNA, 428 bp, Arabidopsis thaliana
  unsure at all n locations
  Clone ID: LIB35-015-Q1-E1-H5
aaacgacagaaggggggggcttttgtggctcctaacgcttctctctctggtgatgtccatgtgggaagaggttcttccatttggtatggatgtgtcttgagaggagatgctaacagcattagtgttggagctgggaccaatattcaggacaacgctcttgtccacgttgctaagaccaacttaagtgggaaggtcttacctactgtcattggagacaatgtcaccattggtcatagtgctgttttacatggctgcactgtcnaggatgaggcctatattggtacaagtgcaactgtcttggatggagctcatgttgaaaaacatgccatggttgcttcaggagctcttgttaagcagaacactagaattccctctggtgangtttggggaagcaacccaactaaatttctgaggaangtgacagaaga

SEQ ID NO: 17542 - DNA, 478 bp, Arabidopsis thaliana
  unsure at all n locations
  Clone ID: LIB35-016-Q1-E1-A2
ntactgccctccgacattcaaggtcgccccacgcgtccgtanagctgcagaagacgacagaagggtacggctgcgagaagacgacagaagggtacggctgcgagaagacgacagaagggtacggctgcgagaagacgacagaagggtacggctgcgagaagacgacagaagggtacggctgcgagaagacgacagaagggtacggctgcnagaagacgacagaagggtacggctgcgagaagacgacagaagggtacggctgcggaagacgacagaaggggaagacaaaaaagcaaatatttattcgtaaatataacttcagaaccctttcaacaaaactctctctgttctttctccgtggagaagttaaagatgacgatgtcggagaactcaagaaacttggaaactggtttgctactgangaagaaccaaaacgacatcaacgaatgtcctatcactgctgttgtacctttcaata

SEQ ID NO: 17543 - DNA, 397 bp, Arabidopsis thaliana
  unsure at all n locations
  Clone ID: LIB35-016-Q1-E1-A6
tgagaaggtctttgtggttggacatgattggggagctctcatcgcttggtatttatgtctcttccgaccagatagagtcaaagctctggtcaacctcagtgttccgttctctttccggccaaccgatccatcggcgaagcccgttgatcgcatgcgtgctttctacggcgatgattactatatctgcaggtttcaggaatttggagatgtagaagctgagattgcagaggttggaacagagagagtcatgaagagactactcacttatagaactcctggaccggtaattatcncgaanggacaaaaatttttggggatccaaagggcnaaactataccactccccgtcttgggctnaacggangaagatgttgcttacttccgtcagcaagtttgaa

SEQ ID NO: 17544 - DNA, 386 bp, Arabidopsis thaliana
  unsure at all n locations
  Clone ID: LIB35-016-Q1-E1-A8
aacgcgtccgcccacgcgtccgcccacgcgtccgcccacgcgtccgtacgactgcgagaagacgacagaaggggagaaagaagaggaagcacaaaagcttctggcgtttggattaggtagaagagcgtgtcctggatcgggtctggcccaacgaatcgtgggactagctctcgggtcattgatacaatgctttgaatgggagagagttgggaatgtggaagtggatatgaaggaangagttgggaatactgtacccaaagcgattcctttgnaagctatttgcaaagctcgtccatttctacataanattatttcctaaaattgttgaaactacgaataaaagatgtgtgacatgttnatgcantcaatgattcccctcgaaaaan

SEQ ID NO: 17545 - DNA, 492 bp, Arabidopsis thaliana
  unsure at all n locations
  Clone ID: LIB35-016-Q1-E1-B1
aactggtttgcctcnccgtaggtacgcnggaattccatagtcgncccaggcgtccgtacggctgcgagaagacgacagaaggggaaagccttaaaggagactcagcattccaatctcgttcgaaaattcaattccgagtaacccatttaggagttcacttacttgaaaaagtgaagcaaaatgcagaggagaaaactgtcgtgtcttattctccgatcctggtggcgagacttgagaatgttggtcttcattccatgttcactgaccagcaaaaatttaaccaattatgtatagaggctctaaatgtggatcacaaatgggcaggggcaccctttgcagccatgcttcgtcagcatcaatcaagttcaagtgacgcaaatggttgtctattcaaatgtgtattcattctagtatcaagtggttccagcgtcacacaagtcaagcactcctcgatagttttgcagccagtcaatttgaacctanacgaagaga

SEQ ID NO: 17546 - DNA, 422 bp, Arabidopsis thaliana
  unsure at all n locations
  Clone ID: LIB35-016-Q1-E1-B10
gccgtccgaccatccanggtggncccacgcgtccgtaaagagaagacgacagaaggggattctcggagagaagagagacgataactccagttttacacgatgctgctgcagtggctggttctggtattggtggcttgcttagtgccgtccatgctttcaatacagggatcccctatcttcaaaatcggttttccgggtcaaagcggctttcctttcttgtgggggttccattgcttctagtatattcaggtgtaggggctgcttttggaggttatgcacttccaaagtttgctcagctgacagttacctcgtattatgcatcttcaagtgcttcacattatggaatttctatgctagcccggcgtatcgaacaagctcgtctctctcgaactcggaaaagaatangtaaaatgaagtcatgc

SEQ ID NO: 17547 - DNA, 395 bp, Arabidopsis thaliana
  Clone ID: LIB35-016-Q1-E1-C1
aataagaagattaattgaggagaaatcgaagatgtctatagcgttagcggagaagattcaagccaaattttgaagaagtctagtagattctgtattgtaagctactaaaatctgcgatggtgaggcatttcaatcgtcgccggaaaattcatcggagatattaaaattgaatcaagcttcgaattggtcaaccgatctatattgagtgatccagaggacgaaaccgagatgtatgtggtttacgcaaacagaaccgaggatgacattcttgtgagggaagagctagaaggatgggctagtaagcataaggagaggctaaagatttggtacgtcgttgaaatcgcaaaggaagttggagttacagtaccgggtttataactgaagctgtgcttaag

SEQ ID NO: 17548 - DNA, 411 bp, Arabidopsis thaliana
  unsure at all n locations
  Clone ID: LIB35-016-Q1-E1-C11
atggagaactttgcctcctgacaacatttcagaaaataatcgaatccaaaaaagcactcaacatggagtcttctatatcacaaacactaagcaaactatcagatcccacgacgtctcttgtcatcgttgtctctcttttcatcttcatcagcttcatcacacggcggcgaaggcctccatatcctcccggtccacgaggttggcccatcataggcaacatgttaatgatggaccaactcacccaccgtggtttagccaatttagctaaaaagtatggcggattgtgccatctccgcatgggattcctccatatgtacgctgtctcatcacccgangtggctcgacaagtccttcaaagttcaagacagcgtctctcnaaccggctgcaactatagctataagctatcctga

SEQ ID NO: 17549 - DNA, 469 bp, Arabidopsis thaliana
  unsure at all n locations
  Clone ID: LIB35-016-Q1-E1-C3
tagntctccgatattccaaggtngccccacgcgtccgtanagctgcgagaagacgacaaaagggcaagtggctgtgatggcgatggagagcctcgtcggagctccggtgcggtggagaaggaggaagaaatagtgaaagatgaggagaggagatccaatgcgtcggtgtgttcggtggaaatagatctggagcttggattgcctgagaaagttgtacatttgtcgcaatctgagagagattgcaggatttgtcacatgagcttagatgcagcgaatcttgaatctggtgttcccattgagcttggctgttcttgtaaagctgatctcgctgctgctcataaacactgtgctgagacttggttcaagatcaaaggaaacaaaatctgtgaagtttgtgggtcgattgcgggtaatgttgttggaagtgttgangtggagtctgaggaaagccggaatgaancaaatggtg

SEQ ID NO: 17550 - DNA, 183 bp, Arabidopsis thaliana
  unsure at all n locations
  Clone ID: LIB35-016-Q1-E1-D1
aagggtacggctgcgagaagacgacagaagggtacggctgcgagaagacgacagaagggtacggctgcgagaagacgacagaagggtacggctgcgagaagacgacagaagggtacggctgcgagaagacgacagaagggcggnnnnnnnnnnnnnnnnnnnnnnnnnnnnnnnnnnngcggc

SEQ ID NO: 17551 - DNA, 512 bp, Arabidopsis thaliana
  unsure at all n locations
  Clone ID: LIB35-016-Q1-E1-D10
gtnggagaatttcttctgctntagccctcntgcatcaaggtggccccaggcntccgtaaagctgcaagaagacgacagaagggtacggtgcgagaagacgacagaaggggagaacaaaatactcatacacacacacacttggatttaaagaaaaaaaggagttttccttcttcttttgggtgtgtcaagtttctgttcttctttttctcgtgcttccatcacgagatatctcacaaggctctcgcgactcaagaaaggtnaagataaagaaagaagaagcaaagattccataaatggacttgaaangcaacaaccaccagcaacagcaacaagtacttgatggctcggacatagttgagctggtgganancgagaaagtgtccgacaagtttgtggaacataagtttcaacagtttagacnaangatgaagaatggtaagctcncccgttgactgaatttncaanccctccgtttctgatntcnggctctgctccttggttttccntgctca

SEQ ID NO: 17552 - DNA, 356 bp, Arabidopsis thaliana
  unsure at all n locations
  Clone ID: LIB35-016-Q1-E1-D11
atgtcttcctgcantagcccccgatatcncaatngncccacgcntccgcccacgcgtccgtacggctgcgagaagacgacagaagggnnnnnnnnnnnnnnnnnnnnnnnnnnnnnngcggccgctctataggatccaagcttacgtacgcgtgcatgcgacgtcanagctcttctatagtgtcncctaanttcnattcactggccgtcgttttanaacgtcgtgactgggaaanccctggcgttacccancttaatcgccttgnagcacatcnccctttcgccagctggcgtaatagcgaagaggcccgcaccgatcgcccttcccaacanttncgcaacctgaatggcnaatgg

SEQ ID NO: 17553 - DNA, 488 bp, Arabidopsis thaliana
  unsure at all n locations
  Clone ID: LIB35-016-Q1-E1-D12
tngtctagcctccgacatcnaaggtngncccacgcgtccgccnacgcgtccgcccacgcgtccgcccacgcgtccgtacggctgcgagaagacgacagaagggggaagaaaaacagatcaaaatagagaaatattgaaattcgtgcgttgagagaaaaacgttgaacgatgggagccggtaatggagaaacgccaaaacctacacagatttcaatttctaaagatcaattcctcgcttggaaacgccaaaaggatgctgagttattagccaaacaagctgaagcagcaaggaaacgacaagaggacatagcttcaggtcgtgttccaatgaatggtcgtgagcttttccttgcatgaacccttgggttttcgacgaataccatcattgaatccgggtctattcactacttcttcatagggnaacaagagatnattccgaccctcaattagttactgccnacttgcatctgagttaatgaattgggaca

SEQ ID NO: 17554 - DNA, 503 bp, Arabidopsis thaliana
  unsure at all n locations
  Clone ID: LIB35-015-Q1-E1-F2
cggggcncccggtccggatataccggggtngacccccgcgtccgcccangcntccgtacggctgcgagaagacgacagaagggcataacgaaacagagtttccctgagctacatttaacgaaagaagattgtatggtcaagaaatggatcgaatctagtgttttctgggcgaattatccagaaaaagcaccgatagagttacttcttaaaagagtatcaaccaacgaatactactggaaacgtacttcagattttgttcaagcaccaatctcaaaacagggtcttgcaaagatttttcaaacaatgattgatcgttcgccacttccacgacgagtttggatgcaatggaatccatggggagggaaaatggctgagatagcgtctgatgcgacggcgtttgtgcatagaggtggtaatgttttcntgattgagcatttcatgaattggtatagacctggagatgagcttganganaagttcttggcgattgccagaagttttta

SEQ ID NO: 17555 - DNA, 501 bp, Arabidopsis thaliana
  unsure at all n locations
  Clone ID: LIB35-015-Q1-E1-F3
cggntccccggtccggataancgggtnggnccacgccttcnntaaancngcgagaagacgacagaaggggactctcagacattttgtcaaacagatggtgctcgtttctgaatcagcttaagaactaacaaggagacagacactaagcttggtttttctctccgattagacggaggaaaaagtgaaaacgaggggcttagacgagtnnnnnnnnnnnnnnnnnnnnnnnnnnnnnnnnnnnnnnnnnnnnnnnnnnnnnnnnnnnnnnnnnnnnnnnnnnnnnnnnnnnnnnnnnnnnnnnnnnnnnnnnnnnnnnnnnnnnnnnnnnnnnnnnnnnttcagatatgcctttgcctcaacagaacagagcctttagtttgtcgcgtgagattttgaatgctactccaaggaangctgataacaaaagactcgctcatgccctaaaaaaggacttcgattcaacctacggnccggcatggcactgcattgttggnacaaacc

SEQ ID NO: 17556 - DNA, 387 bp, Arabidopsis thaliana
  unsure at all n locations
  Clone ID: LIB35-015-Q1-E1-F12
ctgcgagaagacgacagaagggtacggctgcgagaagacgacagaagggtacggctgcgagaagacgacagaagggtgacatcgnnnnnnnnnnnnnnnnnnnnnnnnnnnnnnnnnnnnnnnnnnnnnnnngcggccgctctagaggatccaagcttacgtacncgtgcatgcgacgtcatagctcttctatagtgtcacctaaattcaattcactggccgtcgttttacaacgtcgtgactgggaaaaccctggcgttacccaacttaatcgccttgcagcacatccccctttcgccagctggcgtaatancgaanaggcccgcaccgatngcccttcccaacagttgcncancctgaatggcaatggganccccccttgtaccg

SEQ ID NO: 17557 - DNA, 463 bp, Arabidopsis thaliana
  unsure at all n locations
  Clone ID: LIB35-015-Q1-E1-F5
gcgtccgtacagctgcgagaagacgacagaaggggaatgacagtagacaagacaaggcaaagaagcaaagatcagataatccattttcatttcctcgccagaagcgttctgtaagacctcggatgtacctctccattgactcggattctgagtaatattcttcctgatttgtctgttctgttgtgtctctcttgggatgattcggtgttccttttaattcttaacgctatgcacagaacaatgaacaggatcatcagacaagacaccggagtttaaacaaggatttgcataattctctgtgcaggcaagaattgaaccggtattgatattttcacttgtatgatgttgttgactctctcttcaatatcggttcanaatcttggccttgtctgctacactgcaggatgtaatttgcaaagcgaagcactgggctgatttagtttctctgatagaaaagaaaagt

SEQ ID NO: 17558 - DNA, 503 bp, Arabidopsis thaliana
  unsure at all n locations
  Clone ID: LIB35-015-Q1-E1-G1
anggttttctggcccccgggtccggaatnncgggtcgacncacgcgtccgtacngctgcgagaagacgacagaaggggaccagagacttaaactggtttctgtatcttttactgggttctttcagatatataaatggatcaaatcgttaacgtggatgagtttcaagagctggccaaacaggccctccctaagatgtactatgatttctacaatggaggggcagaggatcaatacgctctcaatgaaaatgtccaagctttccgtagaatcatgtttaggcctanggttcttgttgatgtgagcaacatagatatgtctacaagtatgttgggttacccaatctcagctcccatcatgattgctccaacagcaatgcataagttggctcatcctaaaggagaaatcgccacancgaaagctgcanctgcgtgtaacactatcatgatagtatcattcatgtctacttcactantgangaagttgctccanttgtaacgctgtt

SEQ ID NO: 17559 - DNA, 477 bp, Arabidopsis thaliana
  unsure at all n locations
  Clone ID: LIB35-015-Q1-E1-G10
cccggtccggacancccgggtngcccacgcgtccgtacagaagaagacgacagaaggggaacccaaacaaaaaaacattttttctctataaatcctttattattgttataaaaactccgatggatcggcaaaattccgatgacatcatgagatttctcgatggaatggctagctccgacgacgttcttttcggttttcttgacgaaggaaaccagtcaccggaagatttctccgtaaacctcaacgccggcgaagatgacggtgacgaagacgacaataataacaattctgaagataacaaagctttttggcaggaacacgaacaacttcttcaggggacactgtataggacaagttccattgagacaaagattagacaagctacaaaagaagcgttgaaacaagttaaatctaanggtcttattgtgtttgccggcgaccantggacggcgttgccggatttcctaccttgccaaa

SEQ ID NO: 17560 - DNA, 488 bp, Arabidopsis thaliana
  unsure at all n locations
  Clone ID: LIB35-015-Q1-E1-G11
atgtcttctggntccacggtccgganaaccgggtngacccacgcgtccgcccangcgtccgtacggctgcgagaagacgacagaagggcgagagaagctctatcttcttgctgttgggtattacagaagtgggaattactcaaggagcangcagctcgtggaccgctgtatcgagatgcaagctgattggagacaagctttggtcctaaagaagaccatcgaagacaaaatcacaaaggatggtgttatagggatagggatcacggctacagcctttggagctgtgggtcccatagccggtggtatcgcagcagcgatgtctcgcaagaaatgaaaaccacaaccatgacttcttctctgtgtatacaatggcagtttactttttttcacatttttttcctcntccttgagtgtgttctccactgcctacttcacaatctatgatatnnaaaantcnaagcctatttgcntcgaattaacaaaaaaaa

SEQ ID NO: 17561 - DNA, 512 bp, Arabidopsis thaliana
  unsure at all n locations
  Clone ID: LIB35-015-Q1-E1-G3
ctggtntttctggccccccggtccgganaancggggnngaccccgcgtccgtacagcngcgagaagacgacagaagggggaccttgggccggtgatattagcacccgcgatctaggttcgctggttgcctttgaagatggaacatcaacatcatatgccctggcgagtgcgcaggagagagggcaaatgtttgtaggttctggagtggatgtatacaaaggtcagatagttgggatccaccagagacccggcgacttgggtcttaatatctgcaagaagaaggcagcgacaaacataagatccaacaaagatgtaacagtgattcttgacactcccttaacatatagtccggacgactgcatcnaatacattgaagaggatgagttggtggangttacaccttcnantattaagatgtgcaaagaatcagaaaatggcaaagaaaggcaagcantnaaaacccatttttgcaanctggggtttggaggaaattgaagaaaagcttctactaa

SEQ ID NO: 17562 - DNA, 509 bp, Arabidopsis thaliana
  unsure at all n locations
  Clone ID: LIB35-015-Q1-E1-G6
caatttntgcgcgccctaccggtcnagatatccgggtcgacccacgcgtccgtacagctgcgagaagacgacagaaggggagaagaagaaaaatcgatggcggggatactagtgaacaatatcctccctcaacctccgattctccgatcgctttcttcttcttcgcgaagaagttcaattcgaaccctagttatggtcaaagcttcttcctctgaaccttccgagtctgtttcagtctccacgaagaccagtgacgacactggagctgttgttgtgttcactgctcctcctggtttcaagccaccggagccaaaacggttcgccgtcaaatccggaaaactcttcgatgtcttgggtgcagcaattggattgtttttccgattcggcactggtgttttcgtttctgggtactctgcatccttttgtgtctaaggaagaagattccanctgatcagtatgcgttgcgtttangcgggatnacggtaaaggaaactgctaagtccggcctc

SEQ ID NO: 17563 - DNA, 431 bp, Arabidopsis thaliana
  unsure at all n locations
  Clone ID: LIB35-015-Q1-E1-G7
aagacgacagaaggggtcgctccgatcgttaggcttgaggaggttgccgtcactaccggcggggaagacgaagatgccgtccttgatctgaaatcgaagctttatcgattcgataaggatgcgaatcagtggaaggagagaggagctggtactgtgaagttcttaaagcataagaacactgggaagattcgtctcgttatgaggcaatctaaaactttgaagatctgtgctaatcacttcgttaaatcgggcatgagtgttcaggaacacgttgggaatgaaaagtcatgtgtgtggcacgctcgtgactttgctgatggtgaactcaaggatgagcttttctgtatccgatttgcttctattgagaattgcaaaacatttatgcaaaagttcaaggaagttgcctgantctgaagaagagaaagaagaga

SEQ ID NO: 17564 - DNA, 268 bp, Arabidopsis thaliana
  unsure at all n locations
  Clone ID: LIB35-015-Q1-E1-G8
aanggtttttttggccgccctaccggtcaattatcccgggtcgacccacgcgtccgtacagctgcgagaagacgacagaagggtacggctgcgagaagacgacagaagggtacggctgcgagaagacgacagaagggtacggctgcgagaagacgacagaagggtacggctgcgagaagacgacagaagggtttgnnnnnnnnnnnnnnnnnnnnnnnnnnnnnnnnnnnnnnnnnnnnnnnnnnnnnnnnnnnnnnnnnnnnnnnng

SEQ ID NO: 17565 - DNA, 444 bp, Arabidopsis thaliana
  unsure at all n locations
  Clone ID: LIB35-015-Q1-E1-G9
gcgtccgtacagctgcgagaagacgacagaagggggagagaatctttccggtgaatgggaaatggcaagaagaaggatacgagtacgatgaagttgagttagagcgggagagagagacataccgttgaccactaaagacgagagctttagagagagacgcaacaatggagctgagtatttccgagagtcgaagcagatcaattcgttgcattgtgaaacttggaggtgcggcaattacttgcaaaaacgagctggagaagattcacgatgaaaatctggaggtcgtggcgtgtcagttacgtcaagctatgttgganggttcagctccaagcaaggttattggcatggattggagcaagaganctggaagctctgagatttcctgtgatgtggatgacataggggatnaaaaatctccgaatttaataaattgttgtgggtcaa

SEQ ID NO: 17566 - DNA, 519 bp, Arabidopsis thaliana
  unsure at all n locations
  Clone ID: LIB35-015-Q1-E1-H1
actggtttttctgggccccccggtccggganananccgggtcgacccacgcgtccgcccaagcatccgtacggctgcgagaagacgacagaaggggatcgtgcgtctgtacggaccacaaaaggctctctctttatttctctgtgagatttttttaggatctgagagagccaaagatcatggaggaaagccaagaacttgccttgacccagttgagaaaatcggtcgagaaactctcttcttctactgagggatatgacaaaccaacattgatgaggttcctggtggcaagatnaatggacccagtcaaggnancaaagatgtttgtagattggcaaaaatggagaacctccatggttcctccaactgggattcatccctgagtcagaagtgcaaggatgaattgggattcagaaaggtctgtcttcaaggtccgaccaaatcccggacaaccattgggtgcctgtcaaaacctccaancattttgcctccaaaggattcaactaacttcaagaaattt

SEQ ID NO: 17567 - DNA, 484 bp, Arabidopsis thaliana
  unsure at all n locations
  Clone ID: LIB35-015-Q1-E1-H10
ccgggtccgganaaacccggggtcgacccacgcgtccgtacaagctgcnagaagacgacagaanggcaatatgggatctttcgtgaaagaagaaacgtcgncgttgatgacagattttttggagaagtgcggtggttatgcggtggtggatggagggtttgcgacggagctacagcgccacggagctgatatcaatgatccactttggagtgctaantgccttattacttctcctcaccttgttacaaaggtgcacttggattaccttgaatctggagcaantatcatcatnacagcatcttaccangcgacnatacaaggttttgtggcaaaaggtctatcggtgggangaaacacaaaatttacttacaaggagcgttgaaatcacgtacgaagcacgtnacattttctacaacagatgcaccaagggttcatgggatttcgcctacgcnggaaancnttcccggagaccaantcttgtccc

SEQ ID NO: 17568 - DNA, 521 bp, Arabidopsis thaliana
  unsure at all n locations
  Clone ID: LIB35-015-Q1-E1-C3
aactggtntttctgcgccctcccggtccggnanataccgggtnngaccaccccgtccgtacaagctgcgagaagagacagaaggggaagattggagcagatgcaaatcaagaactgatgtctgggattaaacatttcttcattggcgttttccagtttgctgctgggaaacttggttgggatcctaagcaaggcgagagccatctagatgctatgctgagaggggaagtcttaactgcacttgctgtgtttgggcatgatgagacactaaaggaagcagttcgaagatttgatgcatttttggctgataggaacactccgcttctgcctcctgacattagaanggctgcttatgttgctgtaatgcagagagctaacaaatcagacaaatctggttatgagtctcttctgagagtttatagggaaaccgacctgagccaagagaaaacacgaatcttaagttccttancatcttgcccanaccccactatagttcaagatgttccttaacttcctantgtc

SEQ ID NO: 17569 - DNA, 511 bp, Arabidopsis thaliana
  unsure at all n locations
  Clone ID: LIB35-015-Q1-E1-C4
actggtctttctggncccccggtccggataaccgggttnggncccccgcttcngccnaanngtccgtacggctgcgagaagacgacagaagggggtcaaggaggaagaagtttcgttgccggagaagattacagaggcaccgtcgtctcctccacagtttcttgaacattctgatggtcttaattaccggagtttcacagatctacgtgatcttcttccattaaaggcggcggcttcttcattcgccgccgcagctggatcttcagacagtagcgattcaagcgctctgctgaatgaagaaagcagctctaatgtcactgtggcggctccggtgacggttccaggaggtaatttcttccaatttgtgaaaatggaacagacggaggatnatgaagactttctgaatgganaanaagcctgtgaattcctttccgatgaacaaccgccgtctctacactggtactccaccgttgatnattggaattgaaactgaaaacaccaccggaagaaa

SEQ ID NO: 17570 - DNA, 486 bp, Arabidopsis thaliana
  unsure at all n locations
  Clone ID: LIB35-015-Q1-E1-B9
tctttccgntccccggtccggacaaccgggtcgcccacgcgtccgcccangcgtccgcccacgcgtccgtacggctgcgagaagacgacagaagggtacggctgcgagagacgacagaagggtacggctgcgaagaagacgacagaagggggagcattagaaatggaacagttttttgctctgtttaccatttttctatcttttgctttccccgggagatgcagcgacgttttcagcagatctgatttccccgagggattcctcttcggagctggcacttctgcttatcantgggaangagctgctgcggaagatggaangaaacctagcgtgtgggacactctttgttactctcgtaacattggtaacggagatgtaacatgtgatgggtatcacaagtataaggaagatgtgaagctgatggtagacactaacttagatgccttcaaattctcatatcntggtccaagctaatacctaattgga

SEQ ID NO: 17571 - DNA, 536 bp, Arabidopsis thaliana
  unsure at all n locations
  Clone ID: LIB35-015-Q1-E1-D11
aatggttttcggcccccggtccggaaaaaccgggtcgacccacgcgtccgtacggctgcgagaagacgacagaagggggaagcaaaacgacagtgttatctatcgccgccttgttgttctgtttaacaagtgtagaggaaccaaagttgaaaactttgaacttcccattgattttaatgttaattactgatcattcnaatctgaaattgaagcatatgaatgcctaatcngtgaatgttagaagaaatnnaagaagatgcagagggtaagggttcacctcaaagacatttgtgcataancttggngaatcccaaatgacataacccccaaatttaaaagtaacctgcatccatacaatccgacaattgttcnaataaattnatccgggaattaaaaaantggtccccctaaaaaagganaaacccccntgaaattccccgggtttaaccannaccnaaagntttcncccctnaacnggtccctttaaccggggttccaantttcaaaaancccntgttttcccaagtttaaatccc

SEQ ID NO: 17572 - DNA, 510 bp, Arabidopsis thaliana
  unsure at all n locations
  Clone ID: LIB35-015-Q1-E1-D2
actggtttttctggccncccgggtccgganaannccgggtcgacccacgcgtccgcccangcatccgtacggctgcgagaagacgacagaagggtacggctgcgagaagacgacagaagggtacggctgcganaagacgacagaagggtacggctgcgagaagacgacagaagggggcagcctttggatattcggcggaatcgaaaatggtcaagggacgccaaggagaacgagtcagactctacgtgaggggaaccatcctcggatacaaaaggtcnaagtccaaccagtatccaaacacgtccctcgtccaaatcgaaggagttaacactcangaggangtaaactggtacaagggaaagaagatggctttacatctacaaggctaagacaaagaagaacggtngccactaccgctgtatctggggaaaagtttncaaggcctcacggtaacaacngtttttccgtnccaaattcncatcaaacttcctcccaattcatgggaaaccn

SEQ ID NO: 17573 - DNA, 494 bp, Arabidopsis thaliana
  unsure at all n locations
  Clone ID: LIB35-015-Q1-E1-D3
gaactgtctttctgggcccccggttcggananncccgggtcgacccncgcgtccgcccaagcatccgcccangcgtccgcccacgcgtccgtacggctgcggaagacgacagaaggggaagcggatatctgaaaagtcccatctttggatgctcattcacaacgggcactgcacagatctccaacaagcagcagctgagacattacatctcagactttgatcccgagacattgcanagatgcgcaaaaccaaggacagaggangcaaggaatctgatagagaagcaaagtttggctctttttggcacggaagagagtgatgagaccatagtgacatcgttttcgagtctgaagcggttggttctcgaggctgtggcgtttgggacattcctgtgggacacggaattgtatgtagatggtgcatataaactgaaangagaatgggaatgcngaagaacanaangatagaaaagcatatgatgaacaantctggtt

SEQ ID NO: 17574 - DNA, 508 bp, Arabidopsis thaliana
  unsure at all n locations
  Clone ID: LIB35-015-Q1-E1-D4
nctggccccccggtccggganataccggggnnggacccacgcgtccgcccaagcgtccgtgcgagaagacgacagaagggggtggtggtggtgatttttgggaattttgaagagccgttaaaccctagaacggacggagaagaaaaccctagaccggcgaagaagataaatcagattcgatgtcggataataaagaccgtgattccgattccgatgctccggaggaattaacccaggagcaggcgaagctggaagaggaagcactgtggaaaatacagagagagaataagaatagggtttcccgtgagaagaaagagaggcgcaagcttatggcagancaagtaactctccgaaaatctcnnnnnnnnnnnnnnnnnnnnnnnnnnnnnnnnnnnnnnnnnnnnnnnnnnnnnnnnnnnnnnctcttgcaaacaagggattcctttccaaagacatcatagactttcttgcggagcgagaaaaacaaaaagctgagtcagattttgaa

SEQ ID NO: 17575 - DNA, 508 bp, Arabidopsis thaliana
  unsure at all n locations
  Clone ID: LIB35-015-Q1-E1-D6
ctttttgcntcgccctaccggtcnaganattcccgggtcgacccacgcgtccgcccangcgtccgcccacgcgtccgtacggctgcgagaagacgacagaaggtacggctgcgagaagaaaacgagaggcaagggtcaggcataatatgctctctcactagcctaagaatttgtagaagcgaaaaccatggattagggtttttcagtttcctctttcaatcgattaacccacagaacaaagtatctcttaccttcgggtttagatattctcttcgtctccgtctatatatcatttctcaaagtcgacttacgaatttgactcaggagatatttcgtttgtgattttgttaaggctagcttcaattctattcagattaatcaatgggattctcagatgctcgtgggcgcttggactatcccttgttgggggattaagtacctctttaggtgcgctttttgtanttcttagcgagactcccaatatgaagatgcntggacttctacaagg

SEQ ID NO: 17576 - DNA, 466 bp, Arabidopsis thaliana
  unsure at all n locations
  Clone ID: LIB35-015-Q1-E1-D9
ttctggntcccacggtccggataaccgggtgacccacgcgtccgagaanacgacagaagggtacggctgcgagaagacgacagaagggggctgaagtcagatttctgcgacggagatacagacatttgagacaagaccagccacaagagattaaaaaggtcagaagatcaaatggtgggaagaagatccgagtggaggtgtctcctagtaacaaaagtgaggcggaaactaagcatgtttcgcttcctgacttaaaccactcggaaaaggctcacgatgaaaccaaaaccagtcctaagagaagagttcctttgtttgatctaaatcagatatctggagaagaagagcangaaacagaggcagtggacaataatcaagagaacacgagagttgaagaaagtaattcatgtaagagattaatgatcagtaacattgagatgcagcagaaaagatttgaaaccatcnt

SEQ ID NO: 17577 - DNA, 391 bp, Arabidopsis thaliana
  unsure at all n locations
  Clone ID: LIB35-015-Q1-E1-E10
gagaagacgacagaagggtacggctgcgagaagacgacagaagggtacggctgcgagaagacgacagaagggtacggctgcgagaagacgacagaagggtacggctgcgagaagacgacagaagggtacggctgcgagaagacgacagaaggggacttaaccaaacatgtctgaaaaggggttgataaaaaaagaagaccacatgtttcaagaggagaagagaaagacaaactatggagcaattggcttggcttgcttcatttcttgtttctttgcattccaattcatgaaaatcgtaacaacacaaccttcaacaacaacaacatcatccattgccgttatcgatagccaatgtcctcccataagctatctgatnggaaagaaattttga

SEQ ID NO: 17578 - DNA, 518 bp, Arabidopsis thaliana
  unsure at all n locations
  Clone ID: LIB35-015-Q1-E1-E2
aactgtttttctggccccccgggtccgganaaanccgggtcgacccacgcgtccgcccaagcntccgacggctgcgagaagacgacagaagggggcattgaatgagtctcttcaagatttacttgatggtattcaagaggatttctatgctgttgttgactgggcatataaaatagaccccctacggtgtatttcaatgcatggtataactgaacgttatctatctggtcaaaaagctggtgctgcangatttgttcgccttttgcttggagatntggagtcnagagtttctatgcaattcaaccgttttgtggatnaaacttgtcaccnaattnaaaagaaatggactnatgttagaaaaattggggtcnttgccataaaatccaaanattncancacntggcaactcctatgggacaatncattccaagggnaaactaaaaaatttgggtgatcagacntacacaanaatttntgaagcaaangtttgtgaaccnccanaaaaattgcccacaaaa

SEQ ID NO: 17579 - DNA, 491 bp, Arabidopsis thaliana
  unsure at all n locations
  Clone ID: LIB35-015-Q1-E1-E3
atggtctttcggccncccggtccgganaancggggtngnccacgcgtccgtacagctgcgagagacgacagaagggggctgaaacaagttgtaattgtggtgcatttgttcttcagcgcagccgagaagattcgaaaccggagctaagctatgacgacgattgttcccacctccgaagaaaatccctttctcgctgttgtccgattcacttcccagctcgcctgggccgatgctggtcccgaggcagcagagccagaaattaccaggctctgtagggaggctgaggagtcaatggtagcagagaagtggcttgaattgtcttcgttaatggtcacttcagctgaattggtaccttctaagatatctgagaaagatcttgagtgtacctacaccatcatttgcagcattgtcgagaatgcgaaaagccctgagcaagtcctgaaatggtgaaagctataacntccaaagttgctcaacaanccaattgacaa

SEQ ID NO: 17580 - DNA, 402 bp, Arabidopsis thaliana
  Clone ID: LIB35-015-Q1-E1-E7
ctgcgagaagacgacagaagggtacggctgcgagaagacgacagaagggtacggctgcgagaagacgacagaagggtacggctgcgagaagacgacagaagggtacggctgcgagaagacgacagaagggtacggctgcgagaagacgacagaagggtacggctgcgagaagacgacagaaggggaaagagacgcatttaaaagcaaatgaccaacaagcgacttcaccatccatctcttacaaccctccaagaacactggctgttttccttcactttctagacaaaacaaaaaccatcttctagagaaaataaaccaacatgggagagacagaaaccatggcaacaaactaactaaaccatagtatatattatctatactaatattatcggcccatgggta

SEQ ID NO: 17581 - DNA, 467 bp, Arabidopsis thaliana
  unsure at all n locations
  Clone ID: LIB35-015-Q1-E1-F1
gcgtccgtacagctgcgagaagacgacagaagggggactgtggagaaacactttagcacggtgcgacaagatggcgagctcagtgacgctgcttctatggagtcttcttcttctcggtacactaagcgctattcaggccaaaaagtctaaggaaaacttaaaggagatcacacacaaggtttattttgatgttgaaattgatgggaaagcagctggtcgtattgtcatgggtctatttggcaagacagtccccaaaactgtagagaatttccgagctttatgcactggggagaaaggaatangtaagaatgggaangcgctccattacaaggggagttcatttcataggatcataccaagctttatgctccaaagaggcgattttacacatggaaatgggatgggaagagaatctatcctatggtgaaaaatttgcctgatganaacttcaaactcaagcatactgg

SEQ ID NO: 17582 - DNA, 423 bp, Arabidopsis thaliana
  unsure at all n locations
  Clone ID: LIB35-012-Q1-E1-H2
caacaactaaaaccacatttatcattacagtctgatttgagctaagttctctcatcataaactctccttggagaatcatggctatttcaaaagctcttatcgcttctcttctcatatctcttcttgttctccaactcgtccaggctgatgtcgaaaactcacagaagaaaaatggttacgcaaagaagatcgattgtgggagcgcgtgtgtagcacggtgcaggctttcgaggaggccgaagctgtgtcacatagcgtgcgggacttgctgctacaggtgcaactgtgtgcctccgggtacgtacgggnaactacgacaagtgccacttgctangctagcctcacnacncacgggtggacgccgcaaggtgcccataaanaagaaacanagctcttaaatggctggccgggtaatngggaacc

SEQ ID NO: 17583 - DNA, 424 bp, Arabidopsis thaliana
  unsure at all n locations
  Clone ID: LIB35-012-Q1-E1-H4
ctggtttctttgcccagccctccgganatcaaaggtcgacccaggcntccgcccaaacgtnagtacggctgcgagaagacaacagaaggggatgacgtatctaatgaagtacccacaagtgttgaagaaagctcaagcagaagtgagagagtatatgaaagagaaaggttcaacgttcgttactgaagacgatgtcaagaaccttccttacttcagagccttagttaaagaaaccctaaggatcgaaccagtgattcctctccttatccctcgtgcttgcattcaagataccaagatcgccggttacgacatccccgcaggaacaacggtcaacgtcaacgcgtgggcccgtgtcacgtgacgagaaagaatggggaccgaaccctgatgagtttaggccccanaagtttcntgaagaaaggga

SEQ ID NO: 17584 - DNA, 514 bp, Arabidopsis thaliana
  unsure at all n locations
  Clone ID: LIB35-012-Q1-E1-H10
aactggtttnctttgccctggcccntaccggnnangganatcccggntcgacccacgcgtcngtacngcgagaagacgacagaagggggtttcaggtcaccacttctgtctgcgacgtctcttctcgtgaccaacgagtgaaactcatggaaactgtttcctctctctaccaaggaaaactcaacatcctcgtcaacaatgtgggaacgtcaatattcaagccgaccacagagtatacagcagaagatttctcttttgtaatggctacaaatctcgagtcagctttccatctctcacagcttgcccacccattgttaaaagcctctggctcagggagcatcgtgctcatatcctctgctgctggagtcgtgcatgtcaatgttggatccatctatggagcaaccaaaggagccatgaatcagctggctagaaacttagcttgcgaatgggcgaacgacaacataaggacgaactctgtttgtccttggtatatcacaactcctttaaagtnacg

SEQ ID NO: 17585 - DNA, 429 bp, Arabidopsis thaliana
  unsure at all n locations
  Clone ID: LIB35-012-Q1-E1-H6
aagacgacagaagggggccaaaactgaataaagaaaaggtttacacaaatcttanaatatctgacgcatatataggcgagattgctgacgataagctttttcgttttgtttccatggttttgtgacgaagaagagaaaaaaaataagaagtcagttttttctcaatggcttctcatagctattcaacacttaggtttagtctccttcaagagctaagaagcaacgagatcatcaagacaagccgggcttatctggtgaatcctggaggaagaaaatatgagatattaccggagagctcctttaacctgaaatcacaactcttggagccattgaaacctttttcttcttttagtaagtctaaccactttttggagtttgattcaaccatgatgaagcatagactcatggatgttcaagaaactggaccan

SEQ ID NO: 17586 - DNA, 319 bp, Arabidopsis thaliana
  unsure at all n locations
  Clone ID: LIB35-013-Q1-E1-A1
cgtacggctgcgagaagacgacagaagggtacggctgcgagaagacgacagaagggtacggctgcgagaagacgacagaagggtacggctgcgagaagacgacagaaggatacggctgcgagaagacgacagaaggatacggctgcgagaagacgacagaagggtacggctgcgagaagacgacagaagggtacggctgcgagaagacgacagaanggtacggctgcgagaagacgacagaangatacggctgccagaagacgacagaagggaccttnnnnnnnnnnnnnnnnnnnnnnnnnnnnnnnnnnnnncggcc

SEQ ID NO: 17587 - DNA, 487 bp, Arabidopsis thaliana
  unsure at all n locations
  Clone ID: LIB35-013-Q1-E1-A6
tancagtccggacatcccgggtggncccacgcgtccgtacaagctgcgagaagacgacagaaggggatctcactttgttcatctaaaaactcctcctttcatttccaaacaaaaacttctttttattctcacatcttaaagatctctctcatggcgatgtctttctcaggagctgttctcactggtatggcttcttctttccacagcggagccaagcagagcagcttcggcgctgtcagagtcggccagaaaactcagttcgtcgtcgtttctcaacgcaagaagtcgttgatctacgccgctaaaggtgacggcaacatcctcgatgacctcaacgaggccacaaagaaagcttcagatttcgtgacggataaaacaaaagaggcattagcagatggtgaagaaagcgaaagactacgttgttgaaaaaaacagtgaaaccgcagatacattgggtaaagaagctgagaaagctgcggcgtatgtg

SEQ ID NO: 17588 - DNA, 408 bp, Arabidopsis thaliana
  unsure at all n locations
  Clone ID: LIB35-013-Q1-E1-B6
ctgcgagaagacgacagaagggtacggctgcnagaagacgacagaagggtacggctgcgagaagacgacagaagggtacggctgcgagaagacgacagaagggtacggctgcgagaagacgacagaagggtacggctgcgagaagacgacagaaggganaatcagagaagggtgggaagaaggaaaatttcatcagaaccagattacatgcctttgtggagtatgaaacggtggaggcagctgaaaaagcggcagctacattgaataatgagcaagactggganaaatgggtttccgaagtttaagcttcttgaaacaaagcanccaangaaagttttgcacanaagaangaccagctcngganggaagtcaattaaagannaggacactacaggcanaattcatgat

SEQ ID NO: 17589 - DNA, 517 bp, Arabidopsis thaliana
  unsure at all n locations
  Clone ID: LIB35-013-Q1-E1-C1
aactggtttcgcctctcctacggccccggaaaatcccanagtcgacccacgcctccgtacngctgcgaagaagacgacagaagggtacggctgcgagaagacgacagaaggggacaccgagaaaggcaatggagtcggctaaatcaatcatcggtggccaccaaaatgtcatcctgatgcgtcatggtgatcgactcgacaatttcgagccactctggacttcaacagctgcgagaccgtgggatccaccgcttgctcaagacggtaaggatcgggcctttagaactggtcagagaatccggtctcaacttggggttccgattcaccgtgtcttcgtctcccctttcctccgctgcatccaaaccgcttccgaagtcnttgccgccctctcagccgtcgatttcgattccattgctatgtcatctaaaagacgtgctttccatcggcaatactaagatnaaagtggctaattgaattttggattgtcccaagataccgcacccaatcctttattaag

SEQ ID NO: 17590 - DNA, 468 bp, Arabidopsis thaliana
  unsure at all n locations
  Clone ID: LIB35-013-Q1-E1-C2
gcgtccgtacagnngnnagaanacgacnnaangggaangcaatncattttacctaagagaacagaaanaagacacttagcaggtgaaacaatgtcgtttagaaaagtagagaagaaaccaactgaaatgggccgaaacatgacccacgagaagtcggactctgattcggacaacgaaggagcccccatgactgttggaggttacactgaattcgttgcccgcagcgactctgactgggacgaaccggtttattctggcaaagcccgttctaattataacctcaccggcaccgcaaaangaactgggtcccatcaatancttcagccgcaaacacttccctaattactaatcatatgggcaatgctacgttaaagtngagaaacgaanacattcaggctcactaanctagttnaataatgcccatatnaatttatgttctaagttctgaatgttatnaattaagaatcc

SEQ ID NO: 17591 - DNA, 504 bp, Arabidopsis thaliana
  unsure at all n locations
  Clone ID: LIB35-013-Q1-E1-C5
tactgtccccctggccctaccantccggaattcgcnggtcgacccacgcgtccgcccacgcgtccggctgcgagaagacgacagaaggggaaggaaaaatagaaacaaaaaatggggaattgtttaaggcatgaatcagaaatgcattgggctggtgaagactgggatgaattcatcacagaagatgaagaagatcatcattatagctctaaaaccacaagagatggcaaaccagtaattgtaacacgtgacagtaaatcctctgttccatctcatgagatcaagatcaggctcacgaagaagcaactccatgatttactgagtaaagtcaacgtccatgacttgaccttccagcaacaaaccttctcatgtccaatcctgaacaatcgcgggtacgaagaagtcaatcaacaacggttatggagaccggttctacagagcataccagaagttaactgagttttgttttcagagatggccatgtttgtatatgcctaaggcttc

SEQ ID NO: 17592 - DNA, 503 bp, Arabidopsis thaliana
  unsure at all n locations
  Clone ID: LIB35-013-Q1-E1-C7
tactgtctccctgntctaccantccgnccatcgcnggtngcccacgcgtccgtacagctgcgagaagacgacagaagggtacggctgcgagaagacgacagaagggtacggctgcgagaagacgacagaagggtacggctgcgagaagacgacagaagggtacggctgcgagaagacgacagaagggaggtgaaagaacgaatctgtggaagaagggtttgtgaaatggagtccagtgaggatgtggagaatctgagtagagctattgagaagcttcttcatgagaagaggaagagagaagcttctggtgacgccttcattgaagacgctgatgatcagcttttcctctctagccttatctctcagttgnnnnnnnnnnnnnnnnnnnnnnnnnnnnnnnnnnnnnnnnnnnnnnnnnnnnnnnnnnnnnnnnnnnnnnnnnnttcttcaccatccaaaggaaaaagcganggccanagacaattggaagaaagtatagaaga

SEQ ID NO: 17593 - DNA, 505 bp, Arabidopsis thaliana
  unsure at all n locations
  Clone ID: LIB35-013-Q1-E1-D6
tgtctccctggntctaccggtccgncattcccgggtngacccacgcgtccgtacagctgcgaagacgacagaagggtacggctgcgagaagacgacagaagggcaggcgtgttgaaaatgatgtatctgatgtgaatataagacaaatagaagcagatgagatactggcccgtgaattacaagaacagctgtaccgagaagagtcgttgatcagacacgagcagatcgatgaaatcatagccaggtcgatggaacaagaagagaattctctccgggcttcttctagtcgtgcttctactcgtattacccgaagctctaataccatcgcagcaaatccacgtgggagaagtcgcctggaagcacgactgcaacaacattcttcaagggaggcgattcaatcctccacaggcccgtgctccctgttaagagcaccagcacggggtcnaggttatcgtttangcggtgcatctgcttcactacgtncaactctgaanttcaattttcc

SEQ ID NO: 17594 - DNA, 462 bp, Arabidopsis thaliana
  unsure at all n locations
  Clone ID: LIB35-013-Q1-E1-E2
gcgtccgacggntgcgagaagacgacagaaggggatttctgaaattaagtgaatctgaaggtgaaagcaaagccggaggaagaaataagaatcacagaggtaaaattgtgatggagctcgaagatccaacaatggcagattccacgattaagctaacagtcaaattcggaggcaaatcaataccactttcggtatcaccagattgtacagtcaaagatcttaagtctcagttacaaccaatcaccaacgttcttcctcgtggccagaagctcatcttcaaaggttttggttgaaacgtcgactttgaaacaatctgatgtgggaagtggagctaaactcatgttaatggcttctcaaggtctgcatcaangggaangtccaatacttaangaagctagtataanggcaatctctaaaactgttgtatctgataaagtagatnagagaaagcctaatgtactt

SEQ ID NO: 17595 - DNA, 436 bp, Arabidopsis thaliana
  unsure at all n locations
  Clone ID: LIB35-013-Q1-E1-E8
tggantaccggtccggcgcntcccgggtcgcccacgcgtccgtacaagctgcgagaagacgacggaagggtacggctgcgagaagacgacagaagggtacggctgcgagaagacgacagaagggtacggctgcgagaagacgacagaagggtacggctgcgagaagacgacagaagggtacggctgcgagaagacgacagaagggtacggctgcgagaagacgacagaagggtacggctgcgagaagacgacagaagggtacggctgcgaaagacgacagaagggtacggctgcgagaagacgacagaagggtacggctgcgagaagacgacagaagggtacggctgcgagaagacgacagaanggtacggctgcgacaagacgacagaagggccctccgtaaaaaaaaaaaannnnnnnaaaaaaaaaaaatcgg

SEQ ID NO: 17596 - DNA, 453 bp, Arabidopsis thaliana
  unsure at all n locations
  Clone ID: LIB35-013-Q1-E1-F5
gcgtccgtacagctgcgagaagacgacagaaggggaggtaggcggatcgtggttttcgagcttggttgtgaagattctatcgatcccgggcagatttacatgattcaaggcgtattagctatgctgccgtcaacgactcctgatggagaattaatgagaaatgggggagaaaagaaaaccatttggattgtagaagaagaaggaaagctctccaataaagcctcgacttcaagaaatttttgtctcagcccggttgatccggttgagtatcagtcggattagtatgtccgttttaggcttaggaccgaaatagtgaaagcagaggagtcaaaacccttctgaagttgcgcttttggcgtagatgctattaggacatgttctacactcggatcatgagggactaatagcttggaattggattggatctcangatangatttgattttctttgtg

SEQ ID NO: 17597 - DNA, 446 bp, Arabidopsis thaliana
  unsure at all n locations
  Clone ID: LIB35-012-Q1-E1-D4
tttggncagcctccggatatccaaggtcgncccangcntccgtacgnctcnnnnnnnnnnnnnnnnnnnnnnnnnnnnnnnnnnnnnnnnnnnnnnnnnnnnnnnnnnnnnnnnnnnnnnnnnnnnnnnnnnnnnnnnnnnnnnnnnntcaatttcccaaaattggagaaaccaacaggcaagaaacagacagcgacggttgttgtgggagtgttggcggtgggatggctggcgatagagctcgtgtttaagccattgttcaagaagctgagctcctccaaggacaaatccgattccgacgatgccaccgtccctcccccgtcgggcgcctgaatatggtgagtgaggatttaacaaagcctctgcggggaagacacgtgtgttgaagctcattttattagcanatccttgtggttcnttttgtaataaccgttccggacntttac

SEQ ID NO: 17598 - DNA, 388 bp, Arabidopsis thaliana
  unsure at all n locations
  Clone ID: LIB35-012-Q1-E1-D5
tgcgagaagacacagaagggtacctgggttgatcctgccagtagtcatatgcttgtctcaanagattaaagccatgcatgttgtaaagtatgaacgaattcagactgtggaactgcgaatggctcattaaatcagttatagtttgtttgatggtaactactactcggataaccgtagtaattctagagctaatacgtgcaacaaaccccgacttatggaagggacgcatttattagataaaangtcgacgcgggctctgcccgttgctctgatgattcatgataactcgacggatngcaaggcctctgtccggcgaagcatcnttcanatttctgccaatgcntttggatggggcatncatgttcanctcccaaaancacatgggaac

SEQ ID NO: 17599 - DNA, 455 bp, Arabidopsis thaliana
  unsure at all n locations
  Clone ID: LIB35-012-Q1-E1-D6
ccggggacnaccggaacggatnatcccggctcgacccacgcgtccantacggctgcgagaagacgacagaagggggaatctcacacaccgaaagttattttcgaatccactaacgaatcttccacagcaaacacttttgtgttcctctgtaatttctcagtatatatagataccaaaacaagcagtgaaaaatggctatggcgagtttatatcggcgatctcttccttctcctccggccattgacttttcttccgccgaaggcaagctaatcttcaatgaagcgcttcagaaaggaactatggaaggatttttcaggttgatttcgtattttcagacacaatccgaacctgcgtattgtggtttggctagtctctcantggtgttgaatgctctttctntcgattcctggaagttacatggaaaggggccttgggacgtgggtttgatncaatcc

SEQ ID NO: 17600 - DNA, 496 bp, Arabidopsis thaliana
  unsure at all n locations
  Clone ID: LIB35-012-Q1-E1-C5
tggtttgcccggncctaccgganagganatcccgggccgacccacgcgtccncccaancgtccgtacggctgcgagaagacgacagaagggggcagccattcaaaatattggtggcttcaaattcacctcttacacttgtagcttgtgcttcatccaattctttgcagcgattaaaacacacaaaaagtttgcatatgaattgctgactctgaatttctcaaaaagataagggcattgcttcattgatatggttaagaaatgttagttgcgtatcctgcgggaactatcaacanattccaaatccctattagctgctatgccgctttgcgcagattcaagacctcgccttttggtcctctgattaagttgttctgtctcccaagatcaatagttccttgtngcaaatgtagaantgtnancattcanctttttccacaaaatnnccaaatttcaaacccccgaaaggaaaatgggacgtttgggtaactcanggcc

SEQ ID NO: 17601 - DNA, 511 bp, Arabidopsis thaliana
  unsure at all n locations
  Clone ID: LIB35-012-Q1-E1-D8
tggtcngcccggggaccaccggnnacggatatcccggctcgacccacgcgtcngtacanctgcgagaagacgacagaagggggaagctttgaggaggcaatcggagttatctgagttagaaaaacagtctttaaggaaacaagccataaaagagagtaaacggatacaggaactgtctaaggaagttagttgtctcaagggtgaacgtgatggagctatggaagagtgtgagaagctcaggttgcagaatagtagagatgaggctgatgctgaaagcagattgagatgcatcagcgaagattcgagtaatatgattgaggagattanagatgaactgagttgtgagaaggatttgacgagtaaccttaanttgcagttgcagaggacacaagagtcaaactctaatttgattcttgctgtgagggatctcaatgagatgttggggcacaagaacaatgagatatccttcncnggantagccttattagcaggaggctaagaaaccttgaan

SEQ ID NO: 17602 - DNA, 422 bp, Arabidopsis thaliana
  unsure at all n locations
  Clone ID: LIB35-012-Q1-E1-E10
gaagggggatacagagagagcgatgatgattcgaacggcgttagtgttcgttgtcttcttcgtcggaacagtcgtacaagcgcagctgatacctccggcgaggcgtgatggatttttgtatccaccgggtcggaaaatcgaccgggatatgatacttatcgaggcgtatattgacccggtttgtccggattgtagagacgcttgggagccgctaaagctagcgattgatcactatggatctcgcgttgctcttgttcttcacctcattcctttacccttccatgacaatgcatttgtagcatctcgggctttacacatcgttgataccttaaacgccaatgccacgttcaatttgctggaanggatctcaagcatcagacaattgttcacaactcgcaaacacaactcatgtnaaaaactgc

SEQ ID NO: 17603 - DNA, 493 bp, Arabidopsis thaliana
  unsure at all n locations
  Clone ID: LIB35-012-Q1-E1-E11
tcnggccggctctaccggtaaggacatcccgggncgacccacgcgtccntacnagctgcnagaagacgacagaangggatttgcgctgtacgtgcanatgcctcngatggtatcctctgcancgttcttggacaaaacgctgttcatggtgcgtttgctggatacagtggaatcacggtaggcataatcancactcactatgcatatttgccaatcactgaggtaattgcatatccaaaatcagtggatcctaatagtcgaatgtggcatcgttgcttgacatcaacgggccaacccgatttcatctaaaaagatattattattcaatcacgaancaanctgatgataaaaataagccttgaaatgtatagacagtagcattcttggntccttgttatgatgtatcaantcatattatttaattaantttagtacgaaangcaaacantaaaacttatggtaatacnaaaanngccgtctaaagattcaaact

SEQ ID NO: 17604 - DNA, 424 bp, Arabidopsis thaliana
  unsure at all n locations
  Clone ID: LIB35-012-Q1-E1-E12
ggctgcgaaacgacagaaggggatcgatcaaagtcttgaatatttcatctatatatacctaagaaagaaaagagttaaagaagtatattttcgattcaaagaagaaaaatgaattctcaccagaatcaaaccggagtgcaaaagaagggaataacggagaaaatcatggagaagctaccaggtcatcatggacctactaacactggtgttgttcaccacgagaagaaagggatgacggagaaagttatggagcagctgccaggtcatcatggtgctactggtaccggtggtgttcaccacgagaagaaaggaatgacggaaaaagttatggagcagctgccaggtcatcatggatcacaccaaactgggancaacacaacttatggtactactaacactagtggtgttcaccacgagaaaaaaa

SEQ ID NO: 17605 - DNA, 490 bp, Arabidopsis thaliana
  unsure at all n locations
  Clone ID: LIB35-012-Q1-E1-E4
ggccctccgganatccaaggtcgacccangcntccgcccaancgtcagtacggctgcgagagacgacagaaggggagaccaacaaaaaaaaagagggaaaatctccttgttcaatagtcaataagttagccgctatcgatctagtcatgttgagcatggtaccgacatgtttcaggcttaaccatatggagaagggatgataacgagatctctctagacgtggatgggattttcggttcaaagatggaatattcatataaattcacatgcggattatagttaaatcggaataaagttttgataagtggactctccttacctaagtggggatggtagtccagtcttgtatcaatatatatatttgggctaacttaacatgcatatagaatcattatcantgtgttagaatattcccacctaaggtttcgntcatcccaattcccannattacttcgaaaggggtccaaaaagggaantccatttttccggg

SEQ ID NO: 17606 - DNA, 462 bp, Arabidopsis thaliana
  unsure at all n locations
  Clone ID: LIB35-012-Q1-E1-F3
actggtntcctttgcccagcctccggaaantccaaggtcgacccacgcntccgtacggctgcnagaagacgcagaagggggacttagttgtttttaaggaattgtggaccgtaggagaggagatttattatggtcccggaacaaattccagaggtttccgctcatatcatgcagtgatagtatccagtattgagatctataaaggagaagtggtggccatctgtaagatgagcaatggtactaaagtttgtgacgaaggatatgttagggtttctctagcgacaacatacatggttgtgggtgccagtcctaaaaaaagaacatgttcgggctacttctaagccgatgcatcttctctctgaattcatcatcnnnnnnnnnnnnnnnnnnnnnnnnnnnnnnnnnnnnnnnnnnnnnnnnnnnnnnnnnnnnnnnnnnnnnnnnnnnnnnnngattanccag

SEQ ID NO: 17607 - DNA, 469 bp, Arabidopsis thaliana
  unsure at all n locations
  Clone ID: LIB35-012-Q1-E1-F6
ttggtcngcccggggaccaccggnacgganntcccgggtcgacccacgcgtcnnagcgaaaagacgacagaagggtacggctgcgagaagacgacagaagggtacggctgcgagaagacgacagaagggtacggctgcgagaagacgacagaagggtacggctgcgagaagacgacagaagggtacggctgcgagaagacgacagaagggtacggctgcgagaagacgacagaagggtaaggcaccagcggcagaagaaacaacatctgttaaggaagacaagtgaagactctgttctagagatgatgaagaagagacagcaaaatcaggagacaagaaggatgatgccgttaangaggaaggccaagcgagcaagagacgtcggagcggcggctactacttaggtttcagtttttgaaattttgaanaatggtganaatcatttgctcaatgatggtcttanagtatg

SEQ ID NO: 17608 - DNA, 419 bp, Arabidopsis thaliana
  unsure at all n locations
  Clone ID: LIB35-012-Q1-E1-G1
actggtttgctttgcccagccctccggaantccanaggtcgacccaggcntccgtacgagatgcaagaagacgacagaagggtacggctccgagaagacgacagaagggacactattnnnnnnnnnnnnnnnnnnnnnnnnnnnnnnnnnnnnnnnnnnnnnnnnnnnnnnnnnnnnnnngcggccgcnctanaggatccaagcttacgtacgcgtgcatgcgacgtcataccncttctatagtgtcacctaaattcaattcactggccgtcgttttanaacgtcgtgactgggaaaaccctggngttacccaacttaatcgccttgcagcanatccccctttcgccagctggcgtaatancgaanaggcccgcaccgntngcccttcccaacagttgcgcagcctgaatggcgaatgg

SEQ ID NO: 17609 - DNA, 210 bp, Arabidopsis thaliana
  unsure at all n locations
  Clone ID: LIB35-012-Q1-E1-G7
agaaggatacggctgcgagaagacgacagaagggtacggctgcgagaagacgacagaagggtacggctgcgagaagacgacagaagggtacggctgcgagaagacgacagaagggtacggctgcgagaagacgacagaagggtacggctgcgagaagacgacagaagggtcttgnnnnnnnnnnnnnnnnnnnnnnnnnnnnnngcggcc

SEQ ID NO: 17610 - DNA, 495 bp, Arabidopsis thaliana
  unsure at all n locations
  Clone ID: LIB35-012-Q1-E1-G9
ccgggntctaccggtaaggtgcntcccgggtcgacccacgcgtccgtacnnctgcgagaagacgacagaaggggatcacaagcaaagaaaatggagagcgattcagagatggttccgtttcctcaactaccgatgccaatagaaaacaactacagagcttgcacaattccttacagatttccttctgatgatcccaagaaagccactccaaacgaaatctcgtggatcaacgtcttcgccaattccattccttctttcaagaaacgtgcagagagcgatatcactgttccagatgctcctgctagagctgaaaaatttgcagaaagatatgctgggattcttgaagacttgaagaaagatccagagagtcatggcggaccaccagatggcattcttctatgccgacttcgtgagcaagtactcagagagttaggatttagggacatattcaagaaagttaaggatgangagaatgcaaaggntatatcactaatt

SEQ ID NO: 17611 - DNA, 299 bp, Arabidopsis thaliana
  unsure at all n locations
  Clone ID: LIB35-012-Q1-E1-H1
gactggtttcctttgcccagccctccggaaatccaaggtcgacccacgcctccgtacggctgcaagaagacgacagaagggtacggctgcgagaagacgacagaagggtacggctgcgagaagacgacagaagggtacggctgcgagaagacgacagaagggtacggctgcaagaagacgacagaagggtacggctgcgagaagacgacagaagggtacggctgcgagaagacgacagaagggtatgtaaaaaaaaataaacnntgnaaaaaaaaatnaaaacncgaaaanaagcggcc

SEQ ID NO: 17612 - DNA, 463 bp, Arabidopsis thaliana
  unsure at all n locations
  Clone ID: LIB35-011-Q1-E1-H4
tgccgccctancggtcaatganatcgngggccgacccatccgtacggctgcgagaagacgacagaagggtacggctgcgagaagacgacagaagggtacggctgcgagaagacgacagaaggggatgaagggaataactctagagacagggacanaagtactcactcagcaactgttgttgacgatctaaagtatcgtttgatggatactaccaaagagtttaaggatgttcttaccatgagaaccgagaatatgaaggtccatgaaagtagaaggcaactcttctcttcaaatgcttcaaaagatcaacaaacccatccttcgcaacgtcctttggtgcnaaggtgctccantgaactgttcctctccatggcaatgggtctctcatctcactcattatccatggaaccggagaggagatctcacantgtgnnnnnnnnnnnnnnnnnnnnnnnnnnnattg

SEQ ID NO: 17613 - DNA, 429 bp, Arabidopsis thaliana
  unsure at all n locations
  Clone ID: LIB35-011-Q1-E1-H6
ctaaagcaattgtcagatttcagcatctcccatggaggaatcaagattcgattctgaagatgttgattatgctgagattgttgttgttcgccatggtgaaacatcttggnatgccgagagaaaagtccagggtcatttggatgttgagttaaatgatgcaggaagacaacaagcacaaagagttgcagagcggttatcgaaggagcagaagatatctcatgtatactcttctgacttgaagagagcctttgagactgctcagatcattgctgctaaatgcggcaaagcttgaggtgcttaccgattgtgatttgcgggaaagacatttaagagatatgcaaggacttgtgtatcaaagaagcntccgaaaatttcgccccggaagcttacaaaggctttttcatcctaaaccgcacaagacgttgatat

SEQ ID NO: 17614 - DNA, 451 bp, Arabidopsis thaliana
  unsure at all n locations
  Clone ID: LIB35-011-Q1-E1-H7
gcgtccgtacggctgcgagaagacgacagaagggcaccaaagacactaannnnnnnnnnnnnnnnnnnnnnnnnnnnnnnnnnnnnnnnnnnnnnnnnnnnnnnnnnnnnnnnnnnnnnnnnnnnnnnnnnnncggagaagccataagaacattgttaggctacttaaaggtaagccctttaggaaaccagatatctccgcaacgattcaggaggtattggatagtatgagagctagtggtaaaaatgggattgttgttgatgttggagctaatgttggtatggctagctttgctgctgcggttatggggtttaaagttcttgcctttgaagcctgtttttgagaatttacagangattttgtgatgggatttggtttaatanagttgctcttggtactgtgtttgaaactgctgcttctgacagaacaagggatataccttccataagtt

SEQ ID NO: 17615 - DNA, 456 bp, Arabidopsis thaliana
  unsure at all n locations
  Clone ID: LIB35-011-Q1-E1-H3
gcgtccgtacggctgcgagaagacgacagaaggggacacaacacatacatctatacattgaaaacaaaatagtaatagtcatcatggctaagtttgcttccatcatcacccttatcttcgctgctcttgttctctttgctgctttcgacgcaccggcaatggtggaagcacagaagttgtgcgagaagccaagtgggacatggtcaggggtttgcggaaacagtaatgcatgcaagaatcagtgcattaaccttganngagccanacatggatcatgcaactatgtcttcccagcacacaagtgtatctgttacgtcccatgttaaatctancaataatccttggtgcaaatcctgtgtatttacatanaataagtctctgtcactctatgagtaactttatgacatgcatatttctgttttaatgtttaatttcccgttgttgttacaataataa

SEQ ID NO: 17616 - DNA, 429 bp, Arabidopsis thaliana
  unsure at all n locations
  Clone ID: LIB35-011-Q1-E1-H8
caaagacagttaaacaaagcacaagtgaatctgtcagaactagagactagaagagcagagaagctggaactgaccatgtgtttaagtggaacgaaaaagtagcttgagacatcgcaaaatcggctaaaggagacagaganaaagttaacaagagcttcaaactctgttgtatctaacaaaggatgcaaaagaagcagctgaggatggtttaaaggctgcaaacgggaaaactgaagcgattgaatcaagacttaaagatgtcgaagcagaagcggaatctttgatcttgaaaatcaaatcactggaagacgtcacagagaaggaacgtgctttatcagcaagacacaattcaaaagtgcaacgaactgcaagatgagatttcaanactaaaacaagaactccgagcatcatcangaaacagatcctgcg

SEQ ID NO: 17617 - DNA, 454 bp, Arabidopsis thaliana
  unsure at all n locations
  Clone ID: LIB35-012-Q1-E1-A10
gcgtccgtacnanctgcgagaagacgacagaaggggcaagggatacggtgtttacaagtacgtcgacaagtatggagctgactcagacattgcgagaagaaacgtgcatggaagacgctgtggtgtgtactcgtagtcctttaaacggcaaccgttggatatgctttcacgtttaaaggaaatagcgtggcggagctgactcagacatatgatatgaaccgtataagaagatagtaagagttggtagttggtacaagactcgttgttacatagattgaaaaaaggcgtcggcacatgaaccttgcttaatctatagactatttgtaagagttttgataataggaaggacttataaattattttttgggggaatataatacaagtttgtttttgtaaataagcgatttctttgtaaacgaacatttggattttgggggttatttgtgtgagcatg

SEQ ID NO: 17618 - DNA, 513 bp, Arabidopsis thaliana
  unsure at all n locations
  Clone ID: LIB35-012-Q1-E1-A2
agcctccgganatccaaggtcgacccacgcntccgcccaancgtcangacggctgcgagaagacgacagaaggggagatagagaagacgataaactcacttgccaagaaggcaaatgaaggaaccatatccatagatgagatggctggcggatcattcaccgtttcaaatggcggtgtctatggaagtctcataagcactccgatcattaatcctcctcagtctgccatactcggcatgcactcgattgtgtcatgtccaatggtagtaggaggaagcgtagtgcctagaccaatgatgtatgtcgcacttacgtatgatcacaggctgattgatgggtagaaaggctgtgtacttcctgcgccgtgtnaanggatntttgttggaggatccaccaaaggcntcttcttgacntcccgnaagaattttggttttcnaaggagtcccnaaantgtccgggcttttgncagttaataaaccttgcagtgtccttaaaaacgtttggggggtnaca

SEQ ID NO: 17619 - DNA, 388 bp, Arabidopsis thaliana
  unsure at all n locations
  Clone ID: LIB35-012-Q1-E1-A3
gggcttcaaggtggagcagaagaaaagtaaagccaaggaatgcggtggagctcacgggtatgacaatgccttcttttcgatgagaactatattcatcgggcatggtcctatgttctcaaaaggaaggaaagtgccttcttttgagaatgttcagatatacaatgtgatcagttcgattctaggacttaaggcagcaccaaacaatggatctgatgagctttcttcaagcattctcttgccacgcgtgtagaagggtanggtaagtttattcttctgtcgataaaaggcagtctagactcttgagaccttgttgtcaaaacataaacgcgtttgacctcttaanacgttttaagccgttttgatcggattgcggtttttgnatgattcc

SEQ ID NO: 17620 - DNA, 391 bp, Arabidopsis thaliana
  unsure at all n locations
  Clone ID: LIB35-012-Q1-E1-A9
aaacggtggagagtgaagtgtcacttgtcacctgtaaaatccgccaagtattcctctaaaatatcaaccgatatcgctctccacgagtctcctcaggccttgtttgatgaatatttggaagacaaaccaagggttttcgaagcaatgtttccggataaacccaaaaactataggcttaatgaggaagaatggagaatccaaatgttaccaataaaatttttcttcctcactgcgtgtccagtggtggtcatgcggattagatgcaaatccaacggtcaggattacccatcagacgtacctctacacataaccaaagttcttgagctcaacatgacgaaatgggagctcaagggcttgaccgantaatggaacaactgattcacccttgggt

SEQ ID NO: 17621 - DNA, 498 bp, Arabidopsis thaliana
  unsure at all n locations
  Clone ID: LIB35-012-Q1-E1-B3
agccctccggatatccanggtcggcccaggcntccgtacgnntgcaaagaagacgacagaagggggaattggattcgggggaacacttggaaatgagagaattttcattgatgaagactttgctaaaatcacagtccgtcatcatgcagttgataaaacttaccagtcaggctctcttttcccaaaccagggttatttaccagtagaggctttggttctagatattgaagcatgggggttaggtggaaacaaggctagggaaattcaacaaaaataccagaaaagagaagagcttttcactaaccaacgtcgaaagatcgacttgaaaacgtttacgaactgggaagattcacctgagaaaatgatgatggatatgatgggtaatcctaatgctcctaaaaaagggnagagaggtaattganngaangaccanaactgggtttgnnnatttncccncatanccgttggttgtcccctnaaaattttttggccangaaa

SEQ ID NO: 17622 - DNA, 463 bp, Arabidopsis thaliana
  unsure at all n locations
  Clone ID: LIB35-012-Q1-E1-B4
ggtctccttggccagcctccgganaccangtcgaccacgcntccgtacgnatgcannnnnnnnnnnnnnnnnnnnnnnnnnnnnnnnnnnnnnnnnnnnnnnnnnnnnnnnnnnnnnnnnnnnnnnnnnnnnnnnnnnnnnnnnnnnnnnnnnnnnncttctccttcatcttacggcacgtttcaaggtgtccctacttatcctccaccgtcctatcctcatcctccgtcgcatcatccagtcatcggaattcctcagccgtctccacctcccggatcacctcatcacgacatttccgttcatcaatacattcaagaacatcaaaccgttgctggttaccctgtttctcaaggaagacctgcaagacaaaaccgtcttccttgttgtggtcttggcctccggttggttcctgttcatcaanttggtttccctccttgggtgcaaattccatgggnatgttagg

SEQ ID NO: 17623 - DNA, 376 bp, Arabidopsis thaliana
  unsure at all n locations
  Clone ID: LIB35-012-Q1-E1-B8
ctgcgagaagacgacagaagggtacggctgcgagaagacgacagaagggtacggctgcgagaagacgacagaagggtacggctgcgagaagacgacagaagggggcgttcgattacagctccacagaggattcggaaatggntgagtcanaggttgtagttccagagtcggtgttgaanaagangaagagagaggaggaatgggctttggagaanaagcagantgttgaagccgccaagaagaagaacgccgagaacaggaagcttatcttcaaaagagccgagcactactccanggaatatgccganaagganaangagttatctcgtngaaacccaaggccngcttaagggaagtttctatgttgaccctngaa

SEQ ID NO: 17624 - DNA, 479 bp, Arabidopsis thaliana
  unsure at all n locations
  Clone ID: LIB35-012-Q1-E1-C1
ctttgncctggccctccgganatccanaggtcgacccaggcgtccgctgcaagaaaacaacagaagggggactttgatgcatccgtacgaaaatggagctctgcaccaggtctaccacaatcatcactcatctccctgcgagcttcaacggccatggatatctagcgggaaaatctgttgatagaatctcacttcctctccagcgaaacgttgcgtctctcgttcttcaatcccgcacgttgcgttgtagtagaaagtttccaggagaaacagttactgaagaaacatcaacaggagtcaatgagtttggtgtggaggatcgtgatggagtagttgttgcagccgaagagaaaaactcgaatagtgaagctcctcaagctgangatgaggaaactcaagccctagagtttttgaacgatattaagcctggnctcagaccangacatattcaatcctgccctaaggggattggtgcnaat

SEQ ID NO: 17625 - DNA, 504 bp, Arabidopsis thaliana
  unsure at all n locations
  Clone ID: LIB35-012-Q1-E1-C10
atttgtcnggccgggtctaccggtaaggagntcccgggtcgacccacgcgtccgtacganctgcgagaagacgacagaaggggacgacggagaaatacaaaggtggctcttcaacactcgtcgtcgggaaacagcttctactcgagaactatcctctcggaaaatctctcaaaaatccttacctccgtgctttatccaccaaacttaacggcggtctccgttccataaccgtcgttctaacggcgaaagatgttaccgtcgaaagattctgtatgagccggtgcgggactcacggatcctccggttcgaatccccgtcgcgcagctaacggcgcggcttacgtatgggtcgggaactccgagacgcagtgccctggatattgcgcgtggccgtttcaccagccgatttacggaccacaaacgccgccgttagtagcgcctaacggtgacgttggagttgacggaatgattataaaccttgccacacttctagctaacancgtga

SEQ ID NO: 17626 - DNA, 495 bp, Arabidopsis thaliana
  unsure at all n locations
  Clone ID: LIB35-012-Q1-E1-C2
agccctccggattaccanangtcgncccangcntccgcccaaacgtcagtacggctgcgagaagacgacagaagggggagaaaaggaggcgaaaatggtgcagcgtcttgtttaccggtcgcgacacagctacgccaccaaatcgaaccagcaccgtatcgtcaagactccaggaggtaaattggtgtatcaaaccacaaagaagagagctagtggccccaaatgtcctgttactggcaagcgtattcaaggaatccctcacttgaggccctctgagtacaanaggtcaagattatcaagaaacaggaggactgtaaaccgagcatacggtggagtcttgtctggttctgcagtcagggaaaggatcattcgggcattccttgtcgaagagcanaanattgtgaagaaantgtttgaaactcccaaaagggctaaagggnaaanntanncccccaaaggcttaaagctttaaggttttatccttcnccgttttgg

SEQ ID NO: 17627 - DNA, 504 bp, Arabidopsis thaliana
  unsure at all n locations
  Clone ID: LIB35-009-Q1-E1-H9
ctggtttgctntcgcctgccgtccggaaatcaanggtcgacccacgcgtccgtacggctgcnagaagacgacagaaggggggagagctctgacggcatcagccacctctgcggcttcgcaaatccaaataagctgtggatgaaacgaagaatcctagatttctgaatggcgacaccatttatagcgggggttgcagtagctgcaacagcacttgctggtagatatggaatccaagcatggcaagcattcaaggcaaggccaccaaggcccaaaattaagaaattttatgagggcggtttccagcctacgatgacgaaaagggaagctgctctcattcttggcgtcagggagagtgtagcggcggaaaaggtgaaggaagcacacaggaaggtaatagtagcaaaccatccagatgcangtggtagcatttcctaacctctaagatcaatgaagctaaagacntatgctangcaaaactaaaaacagcggattcgctttttgatg

SEQ ID NO: 17628 - DNA, 505 bp, Arabidopsis thaliana
  unsure at all n locations
  Clone ID: LIB35-010-Q1-E1-B3
gttttttggncgcccggtccgganaaacgggtcgacccccgcgtccggcgnaaaacgacagaagggtacggctgcgagaagacgacagaaggggtacgagcgtcttctgattcgtcaggaatcgacgagatttggggatttgaagatcacgtgtcgaattacggtggtttagattttggttccggcgtcggagatggtggagattacgtggctgttgaggggttgtttgaattttccgacgattgttttgacttcggcgatctgttttcgtggcggtcggagtcgttaccggcggaataaataaataacaaactttttttttaattaggtgggaaatgaaaacgatatcgttttgttaaagcgtttggctctccctcgcttttttttttaacccgatggttaatatctattaactaaaattattaggatttaagaaaagttaaatattttgtaanggtaatttgctagattagtattaacgaaattcgtttgttggtcctccaan

SEQ ID NO: 17629 - DNA, 445 bp, Arabidopsis thaliana
  unsure at all n locations
  Clone ID: LIB35-010-Q1-E1-B6
tcagaagacgacagaagggcaccatcgacaacgttaaggccaagatccaggataaggagggcattcctccggatcagcagaggcctattttcgccggcaagcagctagaggatggccgtacgttggctgattacaatatccagaaggaatccgccctccacttggtcctcaggctccgtggtggtatgcagattttcgttaaaaccctaacgggaaagacgattactcttgaggtggggagttctgacaccatcgacaacgtcaaggccaagatccaagacaaagagggtattcctccggaccagcagaggctgatcttcgccggaaagcaattggaggatggcagaactcttgctgactacaatatccagaangagtccaaccttcatcttgttctcaaggctccgttgtgggtatgcagattttccgttaanacgttgactgg

SEQ ID NO: 17630 - DNA, 227 bp, Arabidopsis thaliana
  unsure at all n locations
  Clone ID: LIB35-009-Q1-E1-H4
tttctttggccagcctccggaaatccanggtcgncccacgcntccgtacggatgcnagaagacgacagaagggtacggctgcgagaagacgacagaagggtacggctgcgagaagacgacagaagggtacggctgcgagaagacgacagaagggtacggctgcgagaagacgacagaagggagatttnnnnnnnnnnnnnnnnnnnnnnnnnnnnnnnnnngcggcc

SEQ ID NO: 17631 - DNA, 469 bp, Arabidopsis thaliana
  unsure at all n locations
  Clone ID: LIB35-010-Q1-E1-B8
gcgtccggcgannnnnnnnnnnnnnnnnnnnnnnnnnnnnnnnnnnnnnnnnnnnnnnnnnnnnnnnnnnnnnnnnnnnnnnnntagcttcacgattccatctccttcctccttctctctttccaattcatataatcaaacctctcctcattccttcactctccgcaattctcgttccaattttgagttccaccggttacgattagatgtggagtctcgaagaagaagcacttctttacggtccaattgctccaccaaaggtacagattcaggtgaaaatgagaacaaaagtgtgttagatgctttctttttggggaaagcattagctgaggttatcaatgagagaattgagtctactgttggagaagtgttgagtactattgggaaagtttcaaagctgagcaacagaaacaagttcaagagattctggaagaagttcttgaaagagctaaagaaaagctaaggaaag

SEQ ID NO: 17632 - DNA, 466 bp, Arabidopsis thaliana
  unsure at all n locations
  Clone ID: LIB35-010-Q1-E1-C3
gcgtccgtacnntgcgagaagacgacagaagggtacggctgcgagaagacgacagaagggtacggctgcgagaagacgacagaaggggagttccctccgttgcttggaatcaacactggacatggaaaacacaaatactcagacaaaggtctagcagctgttttcgagtctcacttgaaggagctaaatgctcctttccatgaagccccagataaggttggctggtttttgactaccagtgttgcggcaaaggcatggttggagtctagacgctcagctggaggagtttctgcgtagcccttgtaattggtatgtagctttgatattgtctatgtggcttcgagctttctccactatttagttttctttctcctgataccggatactggatnangaaagattttgtaatgctagcaaactcgggttatacacattttgaaacaatttanagaactgattaagttcc

SEQ ID NO: 17633 - DNA, 516 bp, Arabidopsis thaliana
  unsure at all n locations
  Clone ID: LIB35-010-Q1-E1-C4
aactggtccttctgggagccccggtccggngnanacgggtcgncccacgcgtccgcccaaacatccgcccacgcgtccgtacggctgcgagaagacgacagaagggtacggctgcgagaagacgacagaagggggaggaagagaaaacaaacctttaactgaagaaagagtttgagtatggcagcgtcgaccataggtagaggttcatcggaggataagccggggaaaagaacatctccggtgactggcaagcccacaagattccccaactgaatcatcgataccgccggtatagcaacgtatgtaatcccggcgatgtcatggatctttatactcccgttgcaatttgcggtgttgcatgaactccaagaatcggtaaataaaggagtcgatatcattaccgaagcttgcaactcactcgtctcgaatcgacaatcgtccatgattggatatcgagtagagagttgcagaacgatgatgtttatgaagttgttaatatattacaagcaaaaagaa

SEQ ID NO: 17634 - DNA, 183 bp, Arabidopsis thaliana
  unsure at all n locations
  Clone ID: LIB35-010-Q1-E1-C5
gcatccgaacaatggaagcttccacattgtccnnnnnnnnnnnnnnnnnnnnnnnnnnnnnnnnnnnnnnnnnnnnnnnnnnnnnnnnnnnnnnngctccgttggttcaatgtaagcttnnnnnnnnnnnnnnnnnnnnnnnnnnnnnnnnnnnnnnnnnnnnnnnnnnnnnnnnnngcggcc

SEQ ID NO: 17635 - DNA, 437 bp, Arabidopsis thaliana
  unsure at all n locations
  Clone ID: LIB35-010-Q1-E1-C7
agaaggggacagacgccatcattaacaacatcctcttaagcttctgcgattctctccgtttgtcggaagatttcacgacgattcttcaatccttatccgaaccggagaaatcatgtcggacgctttgatcaatggattggctggagctggtggtgggatcattgctcagcttctcacttatcctcttcaaactgtaaatacgcgccaacagacggagcgggatctgaagagggagaagaggaaacttggaactatcgaacacatgtgtcaggttgtcaaacaagaaggatgggagaggttatatggtggattggcgccgtctcttgctggaacggctgcatcacagggtgtgtactactacttctaccaagtgtttcggaatcgagctgaagccacagctcttgcacggaagaanaaaggtttgggtgacggattan

SEQ ID NO: 17636 - DNA, 419 bp, Arabidopsis thaliana
  unsure at all n locations
  Clone ID: LIB35-010-Q1-E1-D4
cgacagaagggtgttcttaaaatgggctgcaacgaatctcggatatccatccttggcagagatagaagctgctccaccaacagctgagcttgagcccattcgttctgactattctcagctcgatgaagtcnacatgggaatgacatatnaagagctttcagtctatggaaggatgaggaagatattccgttgtggaccagtatctatgttcaagaatctatgttacaagtggggaacaaagctaagcccagcagaagtagctgagaaagtgaagtatttcttcaaatattattcgatnaatcgacacaaaatgactgtcctcacaccgtcttatcacgctgagagttactccccagaggacaacagattcgatctgaagcaatttctgtacaacagcaagtgggcataccagttttaag

SEQ ID NO: 17637 - DNA, 441 bp, Arabidopsis thaliana
  Clone ID: LIB35-010-Q1-E1-D5
ggctgcgagaagacgacagaagggggatacattagtcgaccgtcgcgcattaatactggtgtggtggttccgttaacgagcaacggcgatgaagagacctcgacctacatctcagccgtcgatctcttccaccgtcaaaccaccactgtctccgccggtcacaccgattctcaaacagaagctacacagaacaggaacacctaaatggttcccgttaaaactaacccacacggagctgacgttgccgttaacttttccgacgggtcaaacattccggtggaagagaactggagcgattcagtatagcggaacgattgggcctcacttagtctctcttagacaacgtccaggagacgacgcagtttcctactgcgtccattgtagcacaagccctaaatccgcggagcttgcgttgctcgattttctcaatgctgagatctc

SEQ ID NO: 17638 - DNA, 512 bp, Arabidopsis thaliana
  unsure at all n locations
  Clone ID: LIB35-010-Q1-E1-F2
actggtttttcggncggcccggtccggganantacgggtcgaccncgcgtccgtacnncagcgagaagacgacagaaggggagagagaatcaaaacaatggccactgtgaaaatctctctttccttggcttcgctatcaccatcttcttcttcttcttcaattcaatctaagttatcaccatctttcattcccaatgcggcacctgcaaaggcggtgaggttgcgattcaatggaaagtccctgagagcaaaaccaatggtatacagatcatctcgctccgttggagtcacctgctctgcttcatcttctctgacgactcttccctctgctcttctcttcgattgcgatggcgttcttgttgataccgagaangacggtcacaggatctccttcaacgacactttcaaagagagagatttgaatgttacgcgggatgttgatttatacggcgagttacttaaaatcngtggtggtaaagaaaggatgactgcgtattttaacaaggttggtt

SEQ ID NO: 17639 - DNA, 430 bp, Arabidopsis thaliana
  unsure at all n locations
  Clone ID: LIB35-010-Q1-E1-F4
gcttcaatcccttgttggctcccattaattcgttccaagcaatcttcttcgatctccctcgtgttggatggcacattctttgagtttcatctccaccaacttgaacagttcagtccttaaccatcatcagtgccagagtttcggaacgtttgtgtcgtcgccatttaaacgaaagaggagatttgcaagaagcattagagctttacaagagactgaaggtccaacgccaagaagattgatagacattataagatctgttcctgaaatctctaggaattacttcaagaagccttcaagaagaacgctttttggaggaatctcgttgntaggtggcttttatgtcgcgcagactatctctctctcgtttggagcattgggagtgaacgatgttattgctgcggttctatgcgtcctttgacagagtatgtga

SEQ ID NO: 17640 - DNA, 437 bp, Arabidopsis thaliana
  Clone ID: LIB35-010-Q1-E1-F6
gcccacgcgtccgcccacgcgtccgcggacgcgtgggtacggctgcgaggacgacagaagggggaagaagagaagaagaagaaccttacaattgcttttgtaaatattgtaggtagtttaaggacgtcactacctacatacatggatttatgtggaactcagatgctgcgcctctcatcgcctcatttcaaaacccttcatttggtgaggcatgcacaaggagtccacaatatagcattaggagagaagggagagaaacctgaatcagaaaagctttttgacgcccacctttctccaaagggtttgcaacaggtttcggaaaggcgcaaccaaatccttgaatcaggattacttaacactgtcgagttagtgataacctctccgctgtgcagagcaatggaaacttcaataggaatatttaggggacaaaggatatg

SEQ ID NO: 17641 - DNA, 363 bp, Arabidopsis thaliana
  unsure at all n locations
  Clone ID: LIB35-010-Q1-E1-F7
aattttcttcggccgntccnaccggtcaagnnatcccgggtcgacccacgcgtccgcacaaacgtccgcccacgcgtccgcccacgcgtccgtagaagacgacagaagggtacggctgcgagaagacgacagaagggtacggctgctagaagacgacagaagggtacggctgcgagaagacgacagaagggtacggctgcgagaagacgacagaagggtacggctgcgagaagacgacagaagggacggctgcgagaagacgacagaagggtacggctgcgagaagacgacagaagggtacggctgcgagaagacgacagaaggggcctnnnnnnnnnnnnnnnnnnnnnnnnnnnngcggcc

SEQ ID NO: 17642 - DNA, 412 bp, Arabidopsis thaliana
  unsure at all n locations
  Clone ID: LIB35-010-Q1-E1-F8
ctcacaacatcaatctcacaggaaggaaagaaagaaagaaagacgagcccttttttctttctaaaaatagaaatatgtctctaaaagccattcatgtctcggaagtgccaagcctcgaccacttccctgagaacccgtcgctcatttgctcctctcgcaaagcgaataacaagtttgtggtggttggccatagaggacacggcatgaacatgtcgcagttgccggatctaaggttctctgctctcaaggagaactccatcctctcctttaatgccgcttcaaaattccctctcgactttatcgaattcgatgttcaggtcaccagagatggctgcccaatcatattccacgacgacttcatctactccgaggaacatggagtggtgtacgagaagagggtcacggangtttg

SEQ ID NO: 17643 - DNA, 549 bp, Arabidopsis thaliana
  unsure at all n locations
  Clone ID: LIB35-009-Q1-E1-F1
gttctncgccagcgtccggaaatccaggtcgaccacgcgtccgcccacgcgtccgcccacgcgtccgtacggctgcgagaagacgacagaaggggaaatcaaaagagagagagatccacaaaattggattgaatcgtcgccggatattccaagagtagagagcttagtttgtctcgcgttgcgtctagatttactgaatatggaggcggagaagtggaacagcgacggtggtgaatacacgtcggaggacgaaggtacagaagattaccgacgcggcggttaccacgccgttcggatcggtgactcattcaaaaccggccggtacgttgtccagagcaaactcggttggggccatttctctactgtttggctctcctgggatactcaatcctctagatatgtggctttgaaggtgcaaaagagtgctcagcattatactgaagcagccatggatgagataacaatattgcaacagattgcagaagggagacactgatgataccaaatgtgttgtgaaaccttttggtgaattnaaacactcaaggcggg

SEQ ID NO: 17644 - DNA, 499 bp, Arabidopsis thaliana
  unsure at all n locations
  Clone ID: LIB35-009-Q1-E1-F10
tctgntctgcccgtccggacatcanaggtcgacccangcgtccgacggatgcgaagaagacgacagaagggggcgatcggagaagaaaaagctcgagagacgccatggaaatttcccaagctcgttcaagcttcgtttgtcttcttcttctgttactctccatgtgtttcgttccctgcgtcttttccaaatctcctcgtcctatctccgatgtggagatcaggcagaagaagagcgaatgctacggtgatatagagagtgggttatggggttggcaatgcaaatcttctgcaatagcgaaagagaattgtgcgctgtgatgcctttctccggtttgctatcaactcatttatgagagtgatccgcttgaagaaggtgaaaaagatttgattaagagccaagagtacaaagtattgtatgtacaagccatcactcggggaaagcttaganggtgttcgaggcatcctttgatggtatcaaataagactttctcagtgaa

SEQ ID NO: 17645 - DNA, 552 bp, Arabidopsis thaliana
  unsure at all n locations
  Clone ID: LIB35-009-Q1-E1-F2
ntggttcctcgccagccgtccggaaatccaaggtcgacccacgcgtccgcccacncgtccgcccacgcgtccgcccacgcgtccgcgagaagacgacagaaggctacggctgcgagaagacgacagaaggctacggctgcgagaagacgacagaaggggaagtcatgaggatgagagaaatgataattcttctgttgtgatggagcttagtctcatcaagctgcaatctttttcgttcccttcttcagtttcaagtgtgaaggatgtgaggttcttaaaccttgatttgaaatcctcacatcagagagctaagagatcatcaactgttgttcctgctttagctgaaacagctgtttctatagcgattgcagccacggttgttggtactgcagctactattcttgttaggagaaataacaaagcctccgaagaaaccgaggcttctatgaaagaatgtgaancttgtcncngntcangaataatgtccctgaatgcaaaggtgaanggatttgttttaaagaaactatcaaatgcaaatggctgagaaaacaa

SEQ ID NO: 17646 - DNA, 561 bp, Arabidopsis thaliana
  unsure at all n locations
  Clone ID: LIB35-009-Q1-E1-F4
antggtttccttcgccagccgtccggaaatccaaggtcgacccacgcgtccgcccacncgtccgtacggctgcgagaagacgacagaagggggcattcgtcatttggtccctccacttagagagaagcagacagaacataactaaaatcgagaaaaatggcaaacagtggtgaaggtaaagtggtgtgtgtaacaggagcctccggttacatcgcctcatggctcgtcaagttcctacttagccgtgactacactgttaaggcctccgtccgtgatcccagtgatccgaaaaagacacaacacttagtttcactagaaggtgcaaaggaaagacttcacttgttcaaagcagaccttttggaacaaggttctttcgactctgctattgatggttgccatggagttttccacactgcttctccattttttaatgatgccaaagacccacaggctgaacttaattgattctgcggtcaaaggggacgcctaacgtttttgaaattcttgcgccaaaagcctccttccggttaaaaaggtngttgttaaccncccccaaggggg

SEQ ID NO: 17647 - DNA, 499 bp, Arabidopsis thaliana
  unsure at all n locations
  Clone ID: LIB35-009-Q1-E1-E6
acggtaaggataccgggtcggccacgcgtccgtacggatgcgagaagacgacagaaggggagacgaagaagcaaagatgttcagaaaccaatacgacacagatgttacgacatggagtccaacaggtcgtttattccaagtggaatacgccatggaagcagtgaagcaaggatctgcagcaattggactcagatctcgttctcatgtcgttctcgcttgtgttaacaaagctcantcggagctttcttcgcatcagaggaagatctttaaagtcgatgaccatatcggtgttgcaatcgctggtctcacagccgacggtcgtgtattgtctcggtatatgagatcggaatcgattaatcactcttttacntatgaagtctcctcttcctgttggtcgtctcgttgttcatcttgttgataaagctcaggtctgtacccaacnatcatgganacgaccctatggtgttggtttgctgggtaggtggattgnatgagtctg

SEQ ID NO: 17648 - DNA, 553 bp, Arabidopsis thaliana
  unsure at all n locations
  Clone ID: LIB35-009-Q1-E1-F7
gtttcgccggcncacggtcaggaaacccgggtcgnccacgcgtccgtacggntgcgagaagacgacagaaggggatctcactttgttcatctaaaaactcctcctttcatttccaaacaaaaacttctttttattctcacatcttaaagatctctctcatggcgatgtctttctcaggagctgttctcactggtatggcttcttctttccacagcggagccaagcggagcagcttcggcgctgtcagagtcggccagaaaactcagttcgtcgtcgtttctcaacgcaagaagtcgttgatctacgccgctaaaggtgacggcaacatcctcgatgacctcaacgaggccacaaagaaagcttcagatttcgtgacggataaaacaaaagaggcattagcagatggtgagaaagcgaaagactacgttgttgaaaaaaacagtgaaaccgcagatacattgggtaaagaagctgagaaagctgcngcgttatgtggaggagaaanggaaaagaaanccccaacaaaggnggnagaanttccccgagggtaaaa

SEQ ID NO: 17649 - DNA, 550 bp, Arabidopsis thaliana
  unsure at all n locations
  Clone ID: LIB35-009-Q1-E1-G1
tggttcttcgccagcctccggaanccaggcgaccacgcgtccggaagacgacagaagggggtcctgtcgatactcgcacaacatctcctatccataaatccgcgcctgcttttatagaattagatacaaaattatcgatttttgaaacaggaattaaagtagtagatcttttggccccttatcgtcgtgggggaaaaattggactattcggtggggctggcgtgggtaaaacagtactaattatggaattgatcaacaacattgctaaagctcatggtggtgtatccgtatttggtggagtaggcgaacggactcgtgaaggaaatgatctttacatggaaatgaaagaatctggagtcattaatgaacaaaatcttgcggaatccaaagtggccctagtttatggtcagatgaatgaaccgccaggagctcgtatgagagttggtctgactgccctaaactatggcaagaatattccgagatgttaatgagcaagacgtacttcaattatcgacaaaaaccttccgtttcgtanaaacaggattcgagg

SEQ ID NO: 17650 - DNA, 507 bp, Arabidopsis thaliana
  unsure at all n locations
  Clone ID: LIB35-009-Q1-E1-G11
nggtctgcttcgccctgcccgtccggaaatcaagggtcgacccacgcgtccgcccangcgtccgtacggctgcgagaagacgacagaagggtacggctgcgagaagacgacagaagggtacggctgcgagaagacgacagaagggtacggctgcgagcagacgacagaagggtacggctgcgaagacgacagaagggtacggctgcgagaagacgacagaagggtacggctgcgagaagacgacagaaggggagaacaaaatactcatacacacacacacttggatttaaagaaaaaaaggagttttccttcttcttttgggtgtgtcaagtttctgttcttctttttctcgtgcttccatcacgagatatctcacaaggctctcgcgactcnnnnnnnnnnnnnnnnnnnnnnnnnnnnnnnnnnnnnnnnnnnnnnnnnnnnnnnnnnnnnnnnccaccagcaacagcaacaagtacttgatggctcggacatagttgagctggt

SEQ ID NO: 17651 - DNA, 517 bp, Arabidopsis thaliana
  unsure at all n locations
  Clone ID: LIB35-009-Q1-E1-G5
ccgggtcgnccacgcgtccgtacggagcgagaaacgacagaaggggggagggagactcatcatagcttcagatggtatatgggatatactgtcttctgatgtggctgccaaagcttgtcgtggtttatctgccgatcttgctgctaaacttgttgttaaggaagcattgcgaacaaaagggttgaaagatgatacgacttgtgtagtcgttgacatagttccatctggtcatctttccttggctccagcacccatgaagaaacagaacccatttacctcatttctttcaaggaaaaaccatatggataccaacaacaaaaatggcaacaagctttctgctgttggagttgtagaagaattgtttgaagaaggttctgctgtgcttgcagatagattgggaaaggatcttctctcaaatacggnaactgggctcntaaaatgtgctgtatgccaaatagatgaatcctccgagtgaangatttatcacccaatggggggtccatcaattcctcancaa

SEQ ID NO: 17652 - DNA, 480 bp, Arabidopsis thaliana
  unsure at all n locations
  Clone ID: LIB35-009-Q1-E1-G7
atggaaatacctttctagagtactcatcagacccagttacatgcgattatgatcgaacttcaggaatccagaccatgaaaaaggtgattacaattcctacatataagcgataagaagaattgaagacgaaaattggaaggaggagctgatgggaaacttaaaaaaatctacacgcagtgacgagttaagccgttctggtccccctcaaattccaaatcctgactggaacaatttgtatcaccgaaccacggtggcctcatgtttggtgcaaggagtttacgcaaaggaaagagacagggaaaacaaccgaaatggttccgagtcattagccacaccttggtggaagagtttcaacttcactttagatgaaagtgaaatcctatatgacgtatttgacggctccatatacggtgctgtcttccaaaacatgntcaattatgagaataccccgaactcgatagtatacctccgcgttacgtg

SEQ ID NO: 17653 - DNA, 504 bp, Arabidopsis thaliana
  unsure at all n locations
  Clone ID: LIB35-009-Q1-E1-G8
gcgtccgtacggatgcgagaagacgacagaaggggacctaatccaataataataaaaaaagagaagaaaatttcccaaaatcaaaaaccctaaatcgaatcaaaatcctttctaataagaatgaaataacccaaaacagcacaaaccgcagcaacagcattgccttctttcaaaagaaccttaaacacaaatccaaacacttctcttgtaatcttacgagcttcaacaaccaatacccttctcgatttcccaaaaaacgcaagcagcacaaccaccgatatccagatcaccataaccgccggaaccgcaaccgcagccgccgcaaccatcgacatggctccaaacacagctcctaacaccacagatgcgtaaaccgccggtaatcttgacggagacggcgatgacgtgtactggagcttgtaccagctaagcacagatgtgaagaaagttccatgaggaagccaggagaatcgcgtagacaggtacanagagacaaacccatgt

SEQ ID NO: 17654 - DNA, 497 bp, Arabidopsis thaliana
  unsure at all n locations
  Clone ID: LIB35-009-Q1-E1-H10
nggttgcttgcctgcctccggaatcaaaggtcgacccacgcgtccgacggntgcgagaagacgacagaagggggtacttcgtttctttggacagtgtacctccacgtattcgtctctggtgatttaatcaaagcctctggagaagatctgtaggtacgtacaaatgtctgaacatgttatggttttgggtaaaggtaacaaaggaatcagcaagaattcttcagtcaatccatatgaatcagcttggttaggtcgttggactcagtcaggtagtgaagtgaagtttcatgatggtgagaccaattgctctaagcagttgataagacctgaagatgagaatcatggagtcgaggtcttgccgtttcctatgttcaaggtttctcaaaagagagagnnnnnnnnnnnnnnnnnnnnnnaaccgtctttccatgaagatgttggttcaagctcgagagctatggttaatanaatgccctggatgtatccgcaaggagaga

SEQ ID NO: 17655 - DNA, 461 bp, Arabidopsis thaliana
  unsure at all n locations
  Clone ID: LIB35-009-Q1-E1-H3
gcgagagacgacagaagggtacggctgcgagaagacgacagaagggtacggctgcgagagacgacagaaggggacagacgccatcattaacaacatcctcttaagcttctgcgattctctccgtttgtcggaagatttcacgacgattcttcaatccttatccgaaccggagaaatcatgtcggacgctttgatcaatggattggctggagctggtggtgggatcattgctcagcttctcacttatcctcttcaaactgtaagtacgcgccaacagacggagcgggatctgaagagggagaagaggaaacttggaactatcgaacacatgtgtcaggttgtcaaacaagaangatgggagangttatatggtggattggcgccgtctcttgctggaacgggtgcatcacanggtgtgtactaccnacntctancnantgtttccggatcgagctggaanca

SEQ ID NO: 17656 - DNA, 462 bp, Arabidopsis thaliana
  unsure at all n locations
  Clone ID: LIB35-009-Q1-E1-C6
aatctaaaagtcgtcaaaaatggctctccgatctgtcaaaacgccgaccttgataacttcggtcgccgtcgtctcctcctccgttaccaacaagcctcactctatcagattctctcttaaaccaacgtcggcactcgtcgtccataaccatcagctatcgttctacggttcgaatctcaagctgaaaccaactaaattccgatgctcagcgtcggctcttacgccgcaacttaaagacacgctggagaaactggtgaattcggagaaagtggttctgtttatgaaaggaacgagagacttcccgatgcgtggattctccaacactgtggttcagattttgaagaatctgaatgttcctttcgaagatgtgaatattctggagaatgagatgttgangcaaggacttaaagagtattcgaattgggcgacgtttccccagcnttatatcggnggtgagttttt

SEQ ID NO: 17657 - DNA, 532 bp, Arabidopsis thaliana
  unsure at all n locations
  Clone ID: LIB35-009-Q1-E1-C7
ccgggtcgncccacgcgtccgcccacacgtccgtacggctgcgagaagacgacagaagggggacttcgagagaagaagccagcaaggaacgatggagnnnnnnnnnnnnnnnnnnnnnnnnnnnnnnnnnnttggagattaggcttgttgtttgatttcgctacgagaaaatggacaagtacgagcttgttaaagacatcggtgctgggaattttggagtggcgaggctcatgagaagtcaaaaactccaagggaactccttgctatgaaatnacatccgaccttggacctaaagattgatgagaacgtggcgagagagattattaaccacagatcacttcgtcatcccaatattatccggtttaaggaggtggttttgacaccaatgcacatcgccattgctatggaatatgctgctggcggtgagctatttgagcgtatatgtaccgctggaagattcantgagggatgaagcaagatactttttccaacancttatctcaaggagtcanggtcttctccactaaaanaa

SEQ ID NO: 17658 - DNA, 504 bp, Arabidopsis thaliana
  unsure at all n locations
  Clone ID: LIB35-009-Q1-E1-C9
gaactggtctgtcngccctgnnctccgganatccanaggtcgacccangcgtccgtacggctgcaagaagacgacagaagggtacggctgcgagaagacgacagaagggtacggctgcgagaagacgacagaagggtacggctgcgagaagacgacagaaggggagccatgaggttgttatatcggttaaaccgttgaaagtcgaaaactggatacttccagaaatgccggggctaattaccgacttcttgatctccctcggtgaccgatttatttactttgtgaactggctccatggagacattcgtcagtacaacatagaggaccctaaaaaccctgtattaacagagcaaatttgggttggaggattactacaaaagggcagtcctgttaaggcggttggagaagacggaaacactttccaattcgaggttcctcagatnaaggggaaatctttacgaggtggacctcaaatgantcagctgacctccatgggaaacgatt

SEQ ID NO: 17659 - DNA, 475 bp, Arabidopsis thaliana
  unsure at all n locations
  Clone ID: LIB35-009-Q1-E1-C5
gttgccgccacggtaagcaaccgggtcgnccacgcgtccgnaagacgacagaagggatggctcgatggctcgctaccaggagatttcgggttcgacccattgggtttggggaaagacccggcttttctgaaatggtacagagaggctgagctgatccatggccgatgggcgatggcagcggttcttgggatcttcgtcggccaggcctggagcggtgtggcatggtttgaagctggagcccagccagacgcgatcgctccctcctcgttcgggtcgcttcttggaacccaattgcttctcatgggttgggtggagagcaaacgatgggtcgatttcttcaacccgggattctcaatcggttgaatggggcaacgccatggtcnaagaccgccganaatttcgcgaactgtaccggcgatcagggataccccggtgggagattcttcgatccgttgggtctcccccnggaaaaacc

SEQ ID NO: 17660 - DNA, 489 bp, Arabidopsis thaliana
  unsure at all n locations
  Clone ID: LIB35-009-Q1-E1-D10
gntcgtccggatatcttaggtcgacccggncgtccgtacnnctgaaagaagacgacagaaggggatagcaattcataacaagaagattagagactacagagacagagaagatgggcatggcaatgaagtcagtttctaacttcgcaatctttttaatcctctttttggtcacctctgaaatatctgagatagaagcgaaagataaggaatgtctaaaaggatacattgatgcgcctttaagctattgtatggctaggatttatccgtcgttgtgttatcgaaattgtcgtttttacaagggcgcgaaaggtggaaaatgcgacggtcttaagtgcttctgcgacttctgcagcgacaagcctttttagtcagtttctgatgagaaatgtttgaatcttggcatgtatantggtttgtgtaatgattaaaggtaaacgaacaantaataatcantaaagttanaataaaaattaaaaacgctagactttg

SEQ ID NO: 17661 - DNA, 466 bp, Arabidopsis thaliana
  unsure at all n locations
  Clone ID: LIB35-009-Q1-E1-D11
tcgacccacncgtccgcggaagcganaggcggctgcgagaagacgacagaagggtacggctgcgagaagacgacagaagggggtttcagaggggctctcttgatgaattctcatttgaaggaccgaaactcggcaaaatcagagctttttggattggtcttgagtctggtcaatggagagttggaagagtgagcttgtgggtggttaatcctcgtggtaaagaaaccgaggcaaaaaccttttgttaccgatatgattttgaagttgatgaactcttgcttggagagagcagtgacctatcaatggtggaacttagacctagccgtatcactgaactcgctgactccgatcaaatctcttcgtcttcagctctgaatcttgaccgtactatggtttccaatgaggaaagcatggaagaatacgcaaacttgaaactctctctgctactctataatgcggttctcat

SEQ ID NO: 17662 - DNA, 492 bp, Arabidopsis thaliana
  unsure at all n locations
  Clone ID: LIB35-009-Q1-E1-D3
gcctccggaaaccaaggtcgaccacgcntccgtacggctgcgagaacaacagaagggatggtattaaaatattgtttctttagatatttatagaatatccaaagattttagtaaactgtattacgaaaatatctatcagattttgtcaggattatcgtcttaacattttcttggttttggtttgactagttgaccgtgccgccaccgaaatctgaagggaggcctatttactaccacatcgcggacgaagaangacacgtggaggaagantcagccgttggatatgcnttgactttcaaaggaaatancgtggaacagttgacgcaggcgttgcaagaagagactagtatggatgatgttgtggtctgtacacgccatccttcaaacggcaagctgtttcctcttcgtttgcaacttccacctaatactggaacaatgcatgtcactctagtacctcaactactttacggcaaggctgtgtggntccccctt

SEQ ID NO: 17663 - DNA, 534 bp, Arabidopsis thaliana
  unsure at all n locations
  Clone ID: LIB35-009-Q1-E1-D4
gttctncgccagccgtccggaatccaggtcgaccacgcgtccgcccacncgtccggctgcgagaagacgacagaagggggagacgagagaaagagaaggtaatcggccacgatgacgatggcgacgcctttcagtggggctgcgaactctattgtggcggcgaggaccgttctgataacgggagtgagcaaaggtctgggaagagccctagctctcgagctggccaagaggggtcacactgtgataggatgcgctcgtagtcaagagaagctcaccgctcttcaatcggagctttcctcttcgaccaatcatctcctcctcaccgctgatgtgaaatcaaacagcagtgtcgaagaaatggcacacacaattgtggagaagaagggtgtcccagatatcatagttaacaatgctggtaccatcaataagaacagcaagatttgggaagtctctgctgaagatttgacagtgtcatggatacaaacgtttaaggagttcaaatgtgctgcgccanttatcccnttgatgctccca

SEQ ID NO: 17664 - DNA, 495 bp, Arabidopsis thaliana
  unsure at all n locations
  Clone ID: LIB35-009-Q1-E1-D6
tggtttggcccgcncaccggtcangaaatcccgggtcgacccacgcgtccgtacggctgcgagaagacgacagaagggtacggctgcnagaagacgacagaagggtacggctgcgagaagacgacagaagggtacggctgcgannnnnnnnnnnnnnnnnnnnnnnnnnnnnnnnnnnnnnnnnnnnnnnnnnnnnnnnnnnnnnnnnnnnnnnnnnnnnnnnnnnnnnnnnnnnnnngaaaagaagctcggctccttcttgattcaggcggctatatctgaatgttcaaatgtcagttatggtcaggctggtagattttcaaatgacggttactcagcttggatttaccgcccttttagaaaccccactttatggagggaaagaaaaacacacnaanacacaaaggaagagtttcgagaccttgtttctctgttagagggtcttgtaagaatgcttatgtggataaatcntttgagttatatcgtcntttgttt

SEQ ID NO: 17665 - DNA, 536 bp, Arabidopsis thaliana
  unsure at all n locations
  Clone ID: LIB35-009-Q1-E1-D7
aattggtctngccgggcnacggtcangcaatacccgggtcgngccacgcgtccgtacggatgcgagaagacgacagaaggggggagtttcaggtagtctccatcgttcctttgtcaggaacaaaccaacgactcaaaatttaaccagagatggtggaaggtgaagaacagaggaggatcacacacttggatctgagaaacgagccccagtttccaatggttttcgttagagaatcgacttgtttcgctaaggacgatctcgctatcttcccgccgatcaaccacgagaatctctacgtcaacggactcgaatctccgtcggtatcatcctcttcttcatcttcctcgtcgagactctcagattcgtccttctctccgtccgattcagacgaacaatttcaatttagccggaaatcgcattctcagccatcggaagatgtcgggaaatctccgtggaaatccgtaattgagattgatattatccaaggttggtggaanaatcttctcgctcgaataatgtcaaattccanaaattgg

SEQ ID NO: 17666 - DNA, 485 bp, Arabidopsis thaliana
  unsure at all n locations
  Clone ID: LIB35-009-Q1-E1-D9
ccgtccggacatcanaggtcgacccnggccgtccgtacganctgtanagaagacgacagctaggacttggtcctcaatctggtttcttttttagtgtctctaatggaagcgaaatgcttctacgaaatgtcccggttttagtcatcccaactgatgtcaggcttgttgcgtgtggacattctcacactctcgtttatatgagagagggacgaatttgtggatggggttataatagttatggtcaagcagcaaatgagaaatcgtcatatgcttggtacccatcgcctgtagactggtgtgtaggacaagtgaggaagctagcagcaggaggtggtcattcagctgttttaaccgatgcattttcgttgaaggagttgtgtgaatttcaattagcagatantgtgaacctctcaaatgcttcagagattcaagatgttgcattcagaatgggattcgaagcttaacccgcctctgcgaaagactga

SEQ ID NO: 17667 - DNA, 525 bp, Arabidopsis thaliana
  unsure at all n locations
  Clone ID: LIB35-009-Q1-E1-E1
cngcctccggaaatccaaggtcgacccacgcntccgcccacgcgtcagcccacgcgtccgcccacgcgtccgtacgcggagaagacgacagaagggcacggctgcgagaagacgacagaagggtacggctgcgagaagacgacagaagggtacggctgcgagaagacgacagaagggtacggctgcgagaagacgacagaagggctacattnnnnnnnnnnnnnnnnnnnnnnnnnnnnnnnnnnnnnnngcggccgctctanaggatccaagcttacgtacgcgtgcatgcgacgtcatagctcttctatagtgtcacctaaattcaattcactggccgtcgttttacaacgtcgtgactgggaaaaccctggcgttacccaacttaatcgccttgcagcacatccccctttcgccagctggcgtaatagcgaanaggcccgcaccgattgcccttcccaacaattgcgcancctgaatggcgaatgggacgcnccctntnttggggcattaaccccncgggtt

SEQ ID NO: 17668 - DNA, 514 bp, Arabidopsis thaliana
  unsure at all n locations
  Clone ID: LIB35-009-Q1-E1-E10
aatgatctgtctgccctgcccgtccgganatcanaaggtcgacccacgccgtccgtacganctgnaaagaagacgacagaagggtacggctgcgagaagacgacagaagggtacggctgcgagaagacgacagaagggtacggctgcgagaagacgacagaagggtacggctgcgagaagacgacagaagggtacggctggcgagaagacgacagaagggtacggctgcnanaagacnacagaagggtacggctgcgagaagacnacagaagggtacggctgcganaagacgacagaagggtacggctgcgataagacgacataanggtacggctgcgagaagacgacagaanggtacggctgcgagaagacgacanaagggtacggctgcganaagacgacanaagggtacggctgcganaagacgacagaanggtacggctgcnagaanacnacagaaaggtacggctgcnagaagacgacagaanggtacngctgccaaaacacgacataa

SEQ ID NO: 17669 - DNA, 424 bp, Arabidopsis thaliana
  Clone ID: LIB35-007-Q1-E1-F12
agaaggggacaacgaaggcatcttcttcatcaattgatctactctgctctgctcaagatcagaaatcgtcggtttagttctccggttaaaagtttcgtctccgcgggaattggaacttcaatggagggattaaagctctcagaagcggaattgatgatttttattcatccttcccagagcagaaacgtttttcaaggaatttgtcgcgagctcagttctcttctattccagtataatgaaacctttgatggagttctattggcttatgatgctactgtgaaaagcaaacaagctaaaatccttacaggacttcatccttactttggcgtcagagttaacactagactactcttatttgattctaagcccaagagttttgtaaagggaaaattgtgaagattctccaaagtcaatccatgttaat

SEQ ID NO: 17670 - DNA, 512 bp, Arabidopsis thaliana
  unsure at all n locations
  Clone ID: LIB35-007-Q1-E1-G1
ctggtccttcggntgcccggtccggacaaaacgggtcgaccacgcgtccgcccaancntccgtacggctgcgagaagacgacaaaaggaatcagaaatgaaatctcgcccagctaagagtggtaaaaccattgagcttgatgatgtcacatttcaccagtgtgtgaacctgaccagattcaactccgagaagactgttagttttgtaccaccggatggagagtttgaactgatgaagtatcgaataacagagggtgtaaatctgcctttccgtgtattaccaacaatcaaagaacttggtcgtacacgtatggaagtaaatgtcaaggtcaaaagtgtgtttggtgctaaaatgtttgcccttggggtcgtggttaaaattccagtgccaaaacaaacaagccaagaacaatttccaagtgacaactggtcgcgctaaatacaatccatcaatcnaatgccttggnttggaagataagaaaattcccaaggcaaacagagtccaagctaaat

SEQ ID NO: 17671 - DNA, 437 bp, Arabidopsis thaliana
  unsure at all n locations
  Clone ID: LIB35-007-Q1-E1-G10
agacgacagaagggggtgtccagagatttaattaaattgttgaatagtggaagatctcaaactgagaacttctttccctattctgtttagtcggacaggacctgcgaggaagatttacaggtgcaattgaggcattcaccagacgaaatgtttcaagccaaggcgctcttggtgatcgctctagacacagatcttctgatgatataccctcttctgccaaggaagtgcacgagtctcgaaatggaagtacctcaaagagaggtgtgatatcaagcaccagacctggctcatcagctgaaccaagcgagaaccactcaagccgactattttcaaagtggttcacgtcatgccacaacccaacgggttccacagagctatgaatccgcaactgcaacaaaggctgggcaataaggatncaataagaaacttcanctccc

SEQ ID NO: 17672 - DNA, 400 bp, Arabidopsis thaliana
  unsure at all n locations
  Clone ID: LIB35-007-Q1-E1-F10
agagaaagtaaagagaaaaaccctaatcttcatcttcatcttctcccgccgtcggccgtaagaggtttcgaagaagcaaagtgagcaacaatggcgggaggcaagatcaggaaggagaagcccaaggcttcgaatagagcaccatcgaaccattaccaaggaggaatatcgttccacaaatcgaaagggcaacatatccttaagaaccctctgcttgtggattcgatcgttcagaaagctggtatcaagagtaccgatgtgattctcganatcggtcccggtactggnaacttgancacgaagcttctaaaagctggcaaaagaagttatcgccgtcaaactgacctcgtatggttcccaacntcaacgcgttttcaanggactcccntctctaaccgcc

SEQ ID NO: 17673 - DNA, 480 bp, Arabidopsis thaliana
  unsure at all n locations
  Clone ID: LIB35-007-Q1-E1-G2
cccgtccgtacggctgangagaagacgacagaaggggtataggagaagcatttggaggaaagattgtgcggccaccatttggtgttatgcatgggaaaagctcaatggttcactatgatgagaaaggagaagaaggcttgttctctggattatcaaaccctttcattgtaggtagatatcacagtctcgtgatcgaaaaagatacatttcctagtgatgaactcgaggttacagcatggacagaagatggtctggtaatggctgcccgtcacagaaagtncaagcatatatanggagtccaatttcatcccggagagtattataacaactgagggcaagacaattgtccgcaantttcatcaaaattantnnangaaaaagggatcccaaaaaactgacatanacctanccctgaattgngaaaatcaaccggtnttcnaanaatggccncccggtaanaanaatttgccaaatgcaaaa

SEQ ID NO: 17674 - DNA, 505 bp, Arabidopsis thaliana
  unsure at all n locations
  Clone ID: LIB35-007-Q1-E1-G3
tggtcttcggcncccggtccgganaaaacgggtcgacccacgcgtccgtacanctgcgagaagacgacagaagggtctgttctctcagtctgtctttcaacacaatcctccttgtaccaaatcccagagagtctcggtgcagcagcaagtacaagagttgcaaacgagttaggagctggaaacccgaaacaagctcgaatggcggtttacacagcgatggttataacaggtgtagaatcaataatggtgggtgcaatagtctttggtgcaagaaatgtatttggttacctattcagttctgaaactgaagttgtagactatgtaaaatcaatggctccactgctttctttatcggtcatattcgatgcccttcacgcagctctctcgggtgtggctagaagatnanggaagcaagatattggggcatacgttaanctaacaacatactaacccctttgggataccaactgctatactattancntttgggtttaaatgaaaggaa

SEQ ID NO: 17675 - DNA, 462 bp, Arabidopsis thaliana
  unsure at all n locations
  Clone ID: LIB35-007-Q1-E1-G6
cacggtcaaatgatcccgggtcgacccacgcgtccgtacaactgcgagaagacgacagaaggggggggtcgcagtgaccaggcccgggcgactgtttaccaaaaacacaggtctccgcaaagtcgtaagaccatgtatgggggctgacgcctgcccagtgccggaaggttaaggaagttggtgacctgatgacaggggagccggcgaccgaagccccggtgaacggcggccgtaactataacggtcctaaggtagcgaaattccttgtcgggtaagttccgacccgcacgaaaggcgtaacgatctgggcactgtctcggagaagaggctcgatgaaatagacanatcttctgcaatancgaaagagaattgtgcgctgcgatgcctttctccggtttgctatcaanctcattttatgagagtnattcnncttgaanaaanggtgaaaaacatttgatttan

SEQ ID NO: 17676 - DNA, 481 bp, Arabidopsis thaliana
  unsure at all n locations
  Clone ID: LIB35-007-Q1-E1-G9
tncccgtccggaatatcaagggtcgacccacncgtccgnagaagacagaaccaaagagacaaggaggcatgtttgtgaagatcaacatgtatggtgttcccattggtcgtaaagttgatctcagtgctcataatagctatgancagttatctttcacagttgacaagctcttcagaggtcttcttgcagctcaaagagactttccatcatccatanaanatgaaanaccaatcactggattattagatgggaatggagaatatactcttacatatgaagacaatgaagganacaagatgcttgtangagatgttccatggcaaatgtttgtgtcttcggtgaagaggctgcgtgtgattaaaacttctgagatttcttcagcattaacatatggaaatggtaagcatgagaaaatgagaagatgaagaanaagatctttacagcttttanagaantagagagatgttactaantgcatttt

SEQ ID NO: 17677 - DNA, 434 bp, Arabidopsis thaliana
  unsure at all n locations
  Clone ID: LIB35-007-Q1-E1-H10
gctgcgagaacgacagaagggggaagagatttgcagcaacagagcgttataaaaaggcgaagcaagagggaagacaacagataacaaattgtgaagaatgggaagcgaaggaagatcgattgcgaggaagccaaggtttttgtgtctccatggatttcgtacgagcggagagataatgaagatacagcttcataaatggcctaaatctgtaattgatagactcgatctcgtgtttctcgatgcaccttttccttgtcaaggcaaatctgatgtcgaaggcatctttgatcctccttattacnagtggtttcaattcaacaaggaattcaccgagtatacggtttcgaaaaatgtttggagtactgggggatnntangataacctngccctttcnagggcccattgggttttcccaggggncatttttccggggg

SEQ ID NO: 17678 - DNA, 412 bp, Arabidopsis thaliana
  unsure at all n locations
  Clone ID: LIB35-007-Q1-E1-H11
cggattcttcgtcaaaagggcactgaatatccaggaacaggggaatatgtcaacttcgacaaggaaggagtttacggttgtgtaggatgcaatgctcctctttataaatccaccacaaagttcaacgctggttgtggctggccagctttctttgaaggaatccccggtgccattacccgaacgacagacccagatgggagaagaatagagatcaactgtgcaacatgtggtggacatcttggtcatgttttcaaaggagaaggtttcgctactccaaccgatgaacgccattgcgtgaacagcgtttcgcttaagttcacacccgcagcgtcttccttgtaaatcttggccgaacaagattanttgtcttctctggattttttcactcaagtgagtgggagaaaaacagaac

SEQ ID NO: 17679 - DNA, 454 bp, Arabidopsis thaliana
  unsure at all n locations
  Clone ID: LIB35-007-Q1-E1-H3
gcgtccgtacggctgcgagaagacgacagaagggggaagaagagaagaagaagaaccttacaattgcttttgtaaatattgtaggtagtttaaggacgtcactacctacatacatggatttatgtggagctcagatgctgcgcctctcatcgcctcatttcaaaacccttcatttggtgaggcatgcacaaggagtccacaatatagcattagaagagaagggagagaaacctgaatcagaaaagctttttgacgcccacctttctccaaagggtttgcaacaggtttcggaaaggcgcaaccaaatccttgaatcaggattacttaacactgtcgagttagtgataacctctccgctgtgcagagcaatgggaaacttcaataggaatattangggacaaggtatgttaatatatccgaagactttgcaaaactaacaacttcctccaattgt

SEQ ID NO: 17680 - DNA, 491 bp, Arabidopsis thaliana
  unsure at all n locations
  Clone ID: LIB35-007-Q1-E1-H4
cgccnccctatggtcacaanaccgtcgncccncgcgtccgtacaacnncgagaagacgacagaaggggggggtcaaaattttaacaaaaaggaggggaaatttgtgtctgaaaaatgtggtgtgcttgctatcatcagccattacctgccagttccgtcgtgttgaatcagcaggcgaagcaagaagagagtctgagaagaaaacaagtgttcttcttcttatcctcatcatctccttcaagcttaagcaccaaacatcaatggcaaatcagtaattatcctaaaaatgggttcagactaaaaccaaaagcgagtgtgttgcctccttctgagtctggtgatatcactacattcctctttgttantggagcaatgatcccatgtatttggtaacaatttccggttcaatcgttgctttcaagtctcccaaggtgaanaanaggaagaagaggaagactccgattaaactatgaactattaaacganttctt

SEQ ID NO: 17681 - DNA, 424 bp, Arabidopsis thaliana
  unsure at all n locations
  Clone ID: LIB35-007-Q1-E1-H7
gtgaccaggcccgggcgactgtttaccaaaaacacaggtctccgcaaagtcgtaagaccatgtatgggggctgacgcctgcccagtgccggaaggttaaggaagttggtgacctgatgacaggggagccggcgaccgaagccccggtgaacggcggccgtaacgataacggtcctaaggtagcgaaattccttgtcgggtaagttccgaccagcacgaaaggcgtaacgatctgggcactgtctcggagagaggctcaagccaccatggtcgctccattcancggcttgaagtcatccgctgcattcccgggtcacccgcaagaccaacaangacatcacttccaagcttcaccgaagncttaatttcctttccaaaacatttcttatgaattaaccccngcccatttcaattccaattgtcgg

SEQ ID NO: 17682 - DNA, 512 bp, Arabidopsis thaliana
  unsure at all n locations
  Clone ID: LIB35-007-Q1-E1-H8
aagacgacagaaggggaagccaaagacaaatttaaacctccgatttcaaccttctcggcnnnnnnnnnnnnnnnnnnnnnnnnnnnnnnntttgcatgtgttgcgattcacatctcgtagcgaaatcgattctaaatccatggaattctcctaggataatgaagctaggtttcgtaccagtcgttcgccgttttccagctactactaccgtcaaggcttcggcggtggattcaacctgagagttcctcaaatttcgccaaagcgttatgggattcgagccttgggattaatcctccacaagcaaaccaaagtccctggttgggatggttcaatcggtngcaaatttcaaaaanggggtcatgttgggnaattgccaaaattgggttgttnccggggttacaanggaattccnttcaatccctttgggggngaataaacaatggccttttggcccaaaggtttcccctccaaaaggggaaataacnttccaagggttggttaaancccggccc

SEQ ID NO: 17683 - DNA, 420 bp, Arabidopsis thaliana
  unsure at all n locations
  Clone ID: LIB35-008-Q1-E1-A10
agaagggggggttaggtttgtcttcaaaatcgtcagaagaagaagaagaagtcaaagacgataacaatgacgtcatcatcgtacctccgatttgcgatcgccgtcgtagctttcctctcaatcaccaccatcaccaccgcacgtccttgcaaaaccttcctaatctcctcatattccctctcaataaccccagaaaaccctaacctcgaatccgatttcacctccacacgattcgtcaccgttttcacaatccgtcgtctaaatcctcaccacgtggtgccttttcttcgtcaatcgtcgtcacgagaagccacagatncaatcggatcgttccctccctttgatcctgataacatcaattcgtttanagatngaaccaagagatattcctaacgtctcgtcgcgcctttgttcngtgtt

SEQ ID NO: 17684 - DNA, 502 bp, Arabidopsis thaliana
  unsure at all n locations
  Clone ID: LIB35-007-Q1-E1-D2
aatgttcccttggcgccccggtccggannnaccgggtcgaccncgccttccgtacaaanagcgagaagacgacagaagggtacggctgcgagaagacgacagaagggtacggctgcgagaagacgacagaagggtacggctgcgagaagacnacagaagggtacggctgcgagaagacgacagaagggtacggctgcgagaagacgacagaagggtacggctgcgagaagacgacagaagggtacggctgcgagagacgacagaagggtacggctgcgagaagacgacagaagggaggaggacggtaccaaggaggangaggacgataccaaggaagcngtgggccacaaggaagaaggggaagtgggggaagttactgccgccacngctgctgctacagangttacaacngctgctcaagatgctgctcgtatgccgganaaactgttcaaactcaacccggtcactaaaacaatatattaaccaatcacaacatgcatgt

SEQ ID NO: 17685 - DNA, 419 bp, Arabidopsis thaliana
  unsure at all n locations
  Clone ID: LIB35-007-Q1-E1-D3
tcaatttggaaaaggaagcagagaggaaatttgcattgaaccttttgggtccatatcagaatatcagacaggcagtcagcgtttatgacgatttatctcatggtattgacagaactgccgaattaacggctggacgctttggtggtatcgatgctttagcacaggagtatggacaaggtatggctaagcaagggatggatgtattactttccacattatcaaagctattcaatctgttgggagacatctcataaaggccaaattgttggggttancgtcccttgatgagaagattaaaccaagaatcagaaaaatcttttgaactttggggtcttcccgttcaatctgcacgcctcaatggtggnaaatttggaggggaantcccaagttcaagccattaacccctgaaggttaanacc

SEQ ID NO: 17686 - DNA, 489 bp, Arabidopsis thaliana
  unsure at all n locations
  Clone ID: LIB35-007-Q1-E1-D5
gcccacgcgtccgtacggctgcgagaagacgacagaagggtacggctgcgagaagacgacagaagggtacggctgcgagaagacgacagaagggtacggctgcgagaagacgacagaagggtacggctgcgagaagacgacagaagggtacggctgcgagaagacgacagaagggtacggctgcgagaagacgacagaagggtatgagagaagtccgaatcttctgaagctagcgaaggaaagagcagtgtttagctttggggacaaggcttagatccaagtacaagatcacttacaatttttacaagaagtgtttccctaaaccgttnaaggctcaaatatccttcaatccctaaaaagaattggtggttttaatnccaaanaanaaaagggccaaaatnccaaaggaaaanannaaaagggttgttttgggncccccaaaccaattgnagnaaaccttaatttgggggaaaaaaaaattgttttaan

SEQ ID NO: 17687 - DNA, 430 bp, Arabidopsis thaliana
  unsure at all n locations
  Clone ID: LIB35-007-Q1-E1-D7
gcgtccggagaagacgacagaagggtacggctgcgagaagacgacagaagggtacggctgcgagaagacgacagaagggtacggctgcgagaagacgacagaagggtacggctgcgagaagacgacagaaggggacatctgagagcttttttcgtttcttgtgagatcatctaaaaaatggcttcgactgcttcgctttctttactcagcggcggcagtggagctcttcaggcgcgttgcgcaagaaccgcgcatgttagcccacgagcggcgcattctaacaaacccgcgctttcttcgttctcgctgaccggcgcctctcgcangaatctgttattttcgttgacngcatcnacggtagttgacgggacttcagcctgcatcnaatggccggagaatattcccttaatttggataagaaagaaactga

SEQ ID NO: 17688 - DNA, 487 bp, Arabidopsis thaliana
  unsure at all n locations
  Clone ID: LIB35-007-Q1-E1-D11
tttggntctgccggtccggacatcaagggtcgacccacgcgtccgcggangcgtgggagacgacagaagggatcccggggtatatacctttacttgtgaacatccttccaggaccgatgattccccaaatgatcgacgcgttgtagaacactacatccccagggcaagtccacggactactctttgggagcatatctgtgttacagatgttctcgactgaagaaagcaaccaccatgtggtcccgagggagacagttgaagcaacaatagtcgcaacgagttgaacgatgaacatagatctcggaggaatcttcatgtagtggccaagtttgaagtctccgacaaagtacaaggcttgagctatactcacagaaccataagtcctaaaagccacattggcaantggctttcccgggtacaagaanccgatgatnaattccgatataacattaagaccaatcgctgggttgtggccnctaggataacc

SEQ ID NO: 17689 - DNA, 403 bp, Arabidopsis thaliana
  unsure at all n locations
  Clone ID: LIB35-007-Q1-E1-D8
actggtttcntcggcggtctaccgcgtccaaacatcccgggtcgacccacgcgtccgtacagctgcgagaagacgacagaagggtacggctgcgagaagacgacagaagggtacggctgcgagaagacgacagaagggtacggctgcgagaagacgacagaagggtacggctgcgagaagacgacagaagggtacggctgcgagaagacgacagaagggaacttggcaactcacttggcggatccacggcacaacaacattggcgatattgttatccctttcaactaatgaatgtaaaaatagaaatatgtgtaccttatgagctttatgtgtatcaaaaacactgtgtaatgaaagacagatttgtgaaaaaaaanatnnngcncnanannanaaaagcggc

SEQ ID NO: 17690 - DNA, 410 bp, Arabidopsis thaliana
  unsure at all n locations
  Clone ID: LIB35-007-Q1-E1-E1
ctgcgagaagacgacagaagggtacggctgcganaagacgacagaagggtacggctgcgagaagacgacagaagggtacggctgcgagaagacgaccgaagggtacggctcgagaagacgacagaagggtacggctgcgagaagacgacagaagggtacggctgccaagaagacgacagaangttacggctgcgagaagacnacagaaggttacngctgcnagaagacgacagaagggganagaagataatgaactccntgggggtttcaattggaacttgttcctcctccaaattgagaaaangaaaattccaatttccttgttnaataaatanccttaaacaaaanccaaaaggctatttaacctttagaaaacaaacccaaaaaantttcttccgnatccccgaatt

SEQ ID NO: 17691 - DNA, 456 bp, Arabidopsis thaliana
  unsure at all n locations
  Clone ID: LIB35-007-Q1-E1-E10
gcgtccgcccaancgtccgtacggctgcgagaagacgacagaaggggacaacaaacacaaaaatcaaaaggggtcatttactatcttttaagagacgacatatatagttctcgaccaagaaaagaaaagggggtgacctgagttcttcaacacataacataatggccggagttttcaaaacggttacgtttcttgttttggttttcgctgccgttgttgtcttcgcggaggactacgatgttggtgatgatacggaatggacgagacctatggaccccgagttctatactacttgggctaccggtaaaactttccgtgtaggcgacgaactcnaatttgatttcnctgctgggaagcatgatgttgcaattgtatcaaaaanctgcanttngaaaactgtgagaaaagagaaanccaataaccacangaccgttcctccggtccaaaattatgcca

SEQ ID NO: 17692 - DNA, 471 bp, Arabidopsis thaliana
  unsure at all n locations
  Clone ID: LIB35-007-Q1-E1-E11
ggtccggacatcangggtcgacccacgcgtccgcccaagcgtccgcccacgcgtccgctgcgagaagacgacagaagggggaagttgcagagaatctagcgagaccaatggctactctggtctcgtctcaaacttacatctaccattgtcatattagtaaacaagctctttatcaggcaaaagaatcatactctcatcgtagaatttcccgtcataatcacagagaaagactcgatttttctcatagaaaccatagattgacaataactagaaagcagcaacctttgtctttcaacaccgtgtgttttgccgcagacgagccctccgaaatcagtgctgatgctagaatccgtagtgaggttctgtctccgttcagatnagtccgtatgttcttctacctcgcctttatagcaagcggttcattaggaggactaatagccacttctaagntcatangtgcctggcgaatcc

SEQ ID NO: 17693 - DNA, 423 bp, Arabidopsis thaliana
  unsure at all n locations
  Clone ID: LIB35-007-Q1-E1-E3
aacactttagcacggtgcgacaagatggcgagctcagtgacgctgcttctatggagtcttcttcttctcggtacactaagcgctattcaggccaaaaagtctaaggaaaacttaaaggagatcacacacaaggtttattttgatgttgaaattgatgggaaagcagctggtcgtattgtcatgggtctatttggcaagacagtccccaaaactgtagagaatttccgagctttatgcactggggagaaaggaatangtaagaatgggaaggcgctccattacaaggggagttcatttcataggatnataccaagctttatgctccaaggaggcgantttacacatggaaattggaatgggaggagaaaccaacctatggtgaaaaattttgctgatgagaacntcaaactcaagcatactggg

SEQ ID NO: 17694 - DNA, 446 bp, Arabidopsis thaliana
  unsure at all n locations
  Clone ID: LIB35-007-Q1-E1-E4
gacagaagggtacggctgcgagaagacgacagaaagggtacggctgcgagaagacgacagaaagggtacggctgcgagaagacgacagaaggggtacggctgcgagaagacgacagaagggtacggctgcgagaagacgacagaanggtacggctgcgagaagacgacagaagggtacggctgcgagaagacgacagaanggtacggctgcgagaagacgacagaaggggacaacaaacacaaaaatcaaaaggggtcatttactatcttttaagagacgacatatataattctcgaccaagaaaagaaaagggggtgaccttagttcttcaacacataacataatggcccggagttttcaaaaccggttacgtttccttgttttggttttcgctgccctttgttgtccttcncgganggactacaattttggtgattaataccgn

SEQ ID NO: 17695 - DNA, 437 bp, Arabidopsis thaliana
  unsure at all n locations
  Clone ID: LIB35-007-Q1-E1-E6
agaaggggactctcagacattttgtcaaacagatggtgctcgtttctgaatcagcttaagaactaacaaggagacagacactaagcttggtttttctctccgattagacggaggaaaaagtgaaaacgaggggcttagacgagtnnnnnnnnnnnnnnnnnnnnnnnnnnnnnnnnnnnnnnnnnnnnnnnnnnnnnnnnnnnnnnnnnnnnnnnnnnnnnnnnnnnnnnnnnnnnnnnnnnnnnnnnnnnnnnnnnnnnnnnnnnnnnnnnnnnttcagatacgcctttgcctcaacagaacagagcctttagtttgtcgcgtgagattttgaatgctactccaagggaaggctgataacaaaagactcgctcatgccctaaaaaaggacttcgattcagcctacggcccggaatgcactgcattgttggnacaag

SEQ ID NO: 17696 - DNA, 429 bp, Arabidopsis thaliana
  unsure at all n locations
  Clone ID: LIB35-007-Q1-E1-E7
ggctgcgagaagacgacagaagggtacggctgcnagaagacgacagaaggatacggctgcnagaagacnacagaaggggatattgtcnagtccgaacatctcgtaactctccttgcagttgttccgaagtattcccaaanagactggctagcatgttatgagactttgaccgattatgtggttcctaggtcctcgaagaaattgtttgaggataatgagtatgccctttacaccgtcactctctttactcgtgtcgcanataatttcaggattgctgctcgtganaaaggattccaagtccgttgattttgancaaagtgttgaancacaagtnacccttaaacaangagctagcaaaanttggttcangatnaaggaangtttnanaacctccctttgcnattggtctacacnagttatggtaaggtt

SEQ ID NO: 17697 - DNA, 491 bp, Arabidopsis thaliana
  unsure at all n locations
  Clone ID: LIB35-007-Q1-E1-E9
tgtccgttgntcgccgtccggagntcaagggtcgacccacncgtccgcccaancgtccgtacggctgcgagaagacgacagaaggggggaaagagtgtttctcccaatcgatcccggtgttgttcttctcgacattgctttcgtccccgacgaacctagccgagggtttttacttggaacgagacagactttgttagagactaaagatggtggaagcacttggaatccacgttcgattccttcagctgaagaagaagatttcaattatagattcaattcgattagctttaaaggcaaagaaggatggattattggcaaacctgcgattttattgtacactgctgatgctggagagaattgggataggattcctctaagttctcagcttcctggagatatggtgtttataaaagcgacagaagataagagtgcagagatggttactgatgaaggtgctaattatgttacctcaaacaggggatataactggg

SEQ ID NO: 17698 - DNA, 501 bp, Arabidopsis thaliana
  unsure at all n locations
  Clone ID: LIB35-007-Q1-E1-F1
actggtcttctggccccccggtccggganaaaccgggtcgacccacgcgtccgcccaagcntccgtacggctgcgagaagacgacagaagggtacggctgcgagaagacgacagaagggtacggctgcgagaagacgacagaagggtacggctgcgagaagacgacagaagggtacggctgcgagaagacgacagaagggtacggctgcgagaagacgacagaaggggagaaaccaaataaaaaaggggaaacttgttttcggtnnnnnnnnnnnnnnnnnnnnnnnnnnnnnngcggccgctctagaggatccaagcttacgtacgcgtgcatgcgacgtcatanctcttctatagtgtcacctaaattcaattcactgggcgtccntttaaaacgtcttactgggaaaancctggcgttaccaacttatcgcccttgcacaaatccccttccgcanctggcnttataccaaaaggccccacgttgccttccaaaattcn

SEQ ID NO: 17699 - DNA, 447 bp, Arabidopsis thaliana
  unsure at all n locations
  Clone ID: LIB35-006-Q1-E1-E9
gcgtccgtacggctgcgagaagacgacagaaggggaatgacgataatgtcagatcttccacgggatttgttagcggagattctcagtagggttccgttgacatctctaagagcagtgcgattgacttgcaaaaagtggaacgatttatccaaagatcggagctttctcaagaagcaaatcgtcgaaacaaagaagaagcaattggaatcgaaggagattgaggtgatcatgatgaggaattttagggtttatctaacaagcatcgatatccacaacaatgttgatccatcatttacgcctaaaggtacacttattagcttaagcgatgatgcaaaccatcatcaagtcgataatgtatctanagtctttcactgcgatggtttactattatgcatcaccaaagacctccactataggcttgtggtttggaacccttattttgggcaa

SEQ ID NO: 17700 - DNA, 418 bp, Arabidopsis thaliana
  Clone ID: LIB35-006-Q1-E1-F11
aagacgacagaagggcacggcaaaagaatcctggggatacaccatttaaatttctttttgacgagaactgtgcggactacaagtactatgtattcaggctggctgaagaggaaaaattaatttcacaaaccaaggattctggtgtacttcacagtggtgatgcaggctcgcgaacgtccacagcagcaatccctttgcaaaagccagcttatcaacaaacaggatatcagatccctgcctcagctctctatgatactcctgtggaacctggagcttcttctagatctgctcaggcatcaattacaagacccagcgacagtgactcctttagtgggccgaggggtgcagaccctctatcaatgatggagttttacatgaagaaggctgcccaagaagagaaaatgagacgtcctaggca

SEQ ID NO: 17701 - DNA, 451 bp, Arabidopsis thaliana
  unsure at all n locations
  Clone ID: LIB35-006-Q1-E1-E10
gcgtccgtacagctgcgnnnnnnnnnnnnnnnnnnnnnnnnnnnnnnnnnnnnnnnnnnnnnnnnnnnnnnnnnnnnnnnnnnnnnnnnnnnttagcgccgtccatggcgggtcttcagagatccaccatctctttccgtcgacagggctcttcgggtatagtctgggacgatcgtctcatcgccgagctaagccaacaagcggccaacgaccggaaaggcgagactctacaacaggacgaacaggccaagctgattacgtcggaagtacaggatcagacaaccaaacctatcgccggagaaggactcaaacctatcagaactgacggaggtatggagaggagtcgattcaacggaggaggagccatccgccancatcgaaacacagggagagtgtctccggcggtggaccccgccgtcgccgagactgtcggcgtttgggtgctgctctg

SEQ ID NO: 17702 - DNA, 469 bp, Arabidopsis thaliana
  unsure at all n locations
  Clone ID: LIB35-006-Q1-E1-F9
ttaactgtccccctggcactaccaagtccggncatcccgggtcgacccacgcgtccgcggacgcgtgggctgcgagaagacgacagaagggtacggctgcgagaagacgacagaagggtacggctgcgagaagacgacagaagggtacggctgcgagaagacgacagaagggtacggctgcgagaagacgacagaagggtacggctgcgagaagacgacagaagggtacggctgcgagaagacgacagaagggtacggctgcgagaagacgacagaagggtacggctgcgagaagacgacagaagggtacggctgcgagaagacgacagaagggtacggctgcgagaagacgacagaagggtacggctgcgagaagacgacagaagggtacggctgccaaagacgacagaagggtacggctgcgagaagacgacagaagggtacngctgcganaagacgacagaaggat

SEQ ID NO: 17703 - DNA, 425 bp, Arabidopsis thaliana
  Clone ID: LIB35-006-Q1-E1-G10
agaagggggagactttcgtgtgcttatccaaagacgacgagaggagtcccaagaagtctagcggtatcaatcaaatctcttcttacttgaggagattccttggaaccatcaagaggaagcattatggctggggaacttatttcgtttggtatacaaaacctgtggaacctactgagtcaagaatgcgagctatttcagggagtcgaagatcaagtaactgaactaaaaagggatctaaacttgttaagctcttttctgaaagatgcagatgcaaagaaacatacaagtgcggtggtgaaaaactgtgttgaagagatcaaggaaattatctacgatggagaggatacaatcgaaacatttgttcttgagcaaaacctgggaaaaacaagtggtatcaagaagagtatcagaagacttgcttgcat

SEQ ID NO: 17704 - DNA, 404 bp, Arabidopsis thaliana
  unsure at all n locations
  Clone ID: LIB35-006-Q1-E1-G11
agacgacagaagggggaataacagagacaattggttatattagctgtcactcccatctttcatattccttcaccatctctctctctctcgatcttgtgaaccactacacacactaacacaatgagagagatccttcacattcaaggtggtcaatgcggtaaccagattggttccaagttctgggaagtcatctgcgacgagcacggcatcgattccaccggacgttacagtggagacactgcagatctccagcttgaacgtatcaatgtctattacaatgaagcttcaggtggaagatacgttcctcgtgctgttcttatgggtcttgagcctggtactatggatagtatcagatccggaccgtttggtcagatctccgtcctgataactttgtcnttggtcag

SEQ ID NO: 17705 - DNA, 420 bp, Arabidopsis thaliana
  unsure at all n locations
  Clone ID: LIB35-006-Q1-E1-G12
tttctgaaattaagtgaatctgaaggtgaaagcaaagccggaggaagaaataagaatcacagaggtaaaattgtgatggagctcgaagatccaacaatggcagattccacgattaagctaacagtcaaattcggaggcaaatcaataccactttcggtatcaccagattgtacagtcaaagatcttaagtctcagttacaaccaatcaccaacgttcttcctcgtggccagaagctcatcttcaaaggttttggttgaaacgtcgactttgaaacaatctgatgtgggaagtggagctaaactcatgttaatggcttctcaaggtctgcatcaaggggaaggtccaatacttaaggaagctagtataangccaatctctanaactgttgtatctgataaagtagatnagagaaagcctag

SEQ ID NO: 17706 - DNA, 473 bp, Arabidopsis thaliana
  unsure at all n locations
  Clone ID: LIB35-007-Q1-E1-A11
ccggaatancatatctgggcccggcccntnngcccaaacgaaaagtacngntgcgagaagacgacagaagggtacggctgcgagaagacgacagaaggggaagtcaaaggaagtgaaaccttcttcctctttcttgaatccatcaaagaatgctacgaagctcttgtcattgccaaattcttggcattgatgtatagttatctaaacatatctatgagcaaaaacattttgcctgatggaatcaaaggaagagagattcaccattctttcccaatgactctttttcagcctcatgtagtccgtttggatcgtcacactcttaaacttttgaaatactggacatggcaatttgtggtcattcgacccgtgtgctccactttgatgatagtttacagctcatcgggttttatccttcatgggtgaactggacattcactatcattggcaaattctcggttctctgggcctgtaat

SEQ ID NO: 17707 - DNA, 449 bp, Arabidopsis thaliana
  unsure at all n locations
  Clone ID: LIB35-007-Q1-E1-A4
cgagaagacacagaagggggcacaaaagatgtgttagtanaaagaagattgggagttgatttgaggaaacctaagtgtaagtancttcctgaaagatttctgggactaataccactttaggatatgggaaagcaatgctcacgggagtgtttcttcaatcagtacaaccaatctgactattgattctcaaggatgtggttccagctctaatgaacctgctgaatttgttaaccatggtcttgtgctatgggaatcaaactcggcagcaatgggtgggaagataaaagatccgagagccgtaaaagcgttgggtcgaagaacccgattctaaatgagaatgtgacntatgagaagtctacttggggagcaacaagcganttccganggcctanacctccttgatgaaatggtngcantttcctggttgaattttggggaagnaaaaaggc

SEQ ID NO: 17708 - DNA, 406 bp, Arabidopsis thaliana
  unsure at all n locations
  Clone ID: LIB35-007-Q1-E1-B10
gaagggggacatggtggaatgtataaccgttatgatggaatttcattaccgtgggatgaacacgccgtgacttcttgtaccggaggactgggtaaccgaagcacaggggataatttcaatggagttccaaatgttgatcacactcagcattttgttaggaaagatataattggatggcttcgttggttacgcaacaccgtcgggtttcaagatttccgttttgactttgctaggggttattcagcaaactatgtgaaggaatacattggcgcagcgaaaccattattcncggttggagaatgttgggattcctgcaattacaatggccatggtctagactataatcaagatagccatagacagcgtataatcantggatcgatgcgacgggacaaatntctgctgc

SEQ ID NO: 17709 - DNA, 497 bp, Arabidopsis thaliana
  unsure at all n locations
  Clone ID: LIB35-007-Q1-E1-B2
gtccttctgcgcnccccggtccgganaaancgggtcgaccacgcgttccgtacanntgcgacgacagaagggtacggctgcgagaagacgacagaagggggattgaggtttttctcttcccctgaatcgctgtgctcgttgtgagagagtgagagatgtgtcctcgagctactcaaacatgcgaaatctgcgagaaggttgtatccaaatacaagtgtccttcttgtcttgttccttactgctcattgggttgtttcaagatacacaaagagactccatgtgctaaaccgtctgatccttcttcaaccgaagaaaagccagcttctccagcaaaggaagtcccggtgaaaagacctgaggaagctaatgatgttgtagagaagacacagcaaaaggctaatgctgcatctccaacgaaaggaaattccngtancaagaacgataaattgtanaaggaaagaaaagtatattttagaaaaagacacagttcnaggcaa

SEQ ID NO: 17710 - DNA, 465 bp, Arabidopsis thaliana
  unsure at all n locations
  Clone ID: LIB35-007-Q1-E1-B3
cggcattcatcgtcggcccccgtcgccaanatccgtacggctgcgagaagacgacaaaagggtacggctgcgagaagacgacaagaagggtaanggctgcnaaaagacgacagaaggggacaacaccgttttcnttgtcaaaaaaagngggaancacacnaaaaaaaaaagcggccgctctaaaggatncaagcttacgtacgcgtgcatgcgacgtcatagctcttctatagtgtcacctaaattcaattcactggccgtcgttttacaacgtcgtgactgggaaaaccctggcgttacccaacttaatcgccttgcagcacatccccctttcgccagctggcgtaatagcgaagaggcccgcaccgatngccttcccaacagttgcgcaacctgaatggcgaatgggaacccgccctgtaacgggggcattaaccccggcgggttttgtgggttacncgcaac

SEQ ID NO: 17711 - DNA, 493 bp, Arabidopsis thaliana
  unsure at all n locations
  Clone ID: LIB35-007-Q1-E1-B5
tcnaaacatcccgggtcgacccacgcgtccgtacnagctgcgagaagacgagagaagggtacggctgcgagaagacgacagaaggggattgagggagaagaatcacattgatagattcgccgccgatctagagccgttgattttcttaatcggaaaaagaaaatgagtggaagcagaaggaaggcgacgccggcgagtaggacgcgagtagggaattacgagatgggacgaactctcggagaaggaagcttcactaaggtgaaatacgccaagaacaccgtcaccggagatcaagccgctatcaaaatcctcgaccgagaaaaggccttccgtcacaaaatggtcgaacagcttaaaagagaaatatctacaatgaaactgattaaacatccaaatgttgttgaaatcattgaggttatggcgagcaaaacgaagatttatatccgttcttgaaccttgtcaatggangtnaactccttgataaaatcccnca

SEQ ID NO: 17712 - DNA, 425 bp, Arabidopsis thaliana
  unsure at all n locations
  Clone ID: LIB35-007-Q1-E1-C5
ggctgcgagaagacgacagaagggtacggctgcgagaagacgacagaagggggtgtgcaaaagccaaagctttgatctttcattaattcttctcaagatcttcagagtctacaagggaagatcaaagtaattaaataagcggaagtaagaggaagtgatgttttctcttatgtctggactatggagttacatgtttagcaagactgagtttaatgtgcttattcttggtatcgacaaagctgggaagacgacatttttggagaaactgaagacgatatactcaatctcggaaggtcttcctcatgatcgaattgttcctactgtggggcttaatattggcgcattgaatctcaatgctaaaattgtgttctggatctgggagtcancctggtttgcggccaattgggagaatactatgaanaaca

SEQ ID NO: 17713 - DNA, 451 bp, Arabidopsis thaliana
  unsure at all n locations
  Clone ID: LIB35-007-Q1-E1-D10
gcgtccgcccaagcgtccgtacggctgcgagaagacgacagaaggggaatctcggagaagggaggaaaaatggcggccaaaaccctaatcaggtcaggagcttcgttgatgaatcggtttctaacgaagccgacaacgaatatcgtgcagaacaatctcagatcttcttttcaatacatagctcctcagggacaagaaatcccgccgtattttttcccgtcgttgtcgaatctacagagctcactcatttcgcgccctaacgacactgcttcgctccaggaactcaacgaacgtggatttctttacccttctggtcttccttcactcgaattcttcttgccagaagttgatccttcaagtgagccattgcttctgtttcctaagaggacattccaaccaagcactataaggcgtaaacggnaccatggattctttgctcggaaggnaacaa

SEQ ID NO: 17714 - DNA, 514 bp, Arabidopsis thaliana
  unsure at all n locations
  Clone ID: LIB35-003-Q1-E1-H4
aactgtttacgcctgcccgtaccngtnttacnctgccnggtcnanccaancgtccgtacgtgctgcgaagaagacgacagaagggtacggctgcgagaagacgacagaagggtacggctgcgagaagacgacagaagggtacggctgcgagaaacgacagaagggtacggctgcgagaagacgacagaaggggcacaagattcagctacaaggttctttgacttacctgccgatgagaagatgcatctggtttctgataattttcaggagccagtaaggtatggtaccangcataaaccattcaacagacagagttcattactggagagatttcataaaacattactcccatcctctctcaaactggatcaatttgtggccttccaatcctccctgctacaaggaaaaggtggggaaatacgcaaaagcaacgcatgttttacataagcaactaatttaanctatctcaaaaatctaagncnnggggaaaaattccttccnggaagaatttaaa

SEQ ID NO: 17715 - DNA, 391 bp, Arabidopsis thaliana
  unsure at all n locations
  Clone ID: LIB35-003-Q1-E1-H6
gcgctttctctctctaaacttagctcagcctatcgattaattcctctccggaataaggaaatttcacctcgatttattgattagtcggaagaattcggaaccaattctgaaccagacctgaaattttccaatggggcggaagaagccgagtgctcgaggtggagatgctgagcagcaacctcctgcgtcatctctcgttggtgctactaaatctaagaagaaaggtgctcaaattgatgacgatgagtactcaataggtactgagttgtctgaggagtctaaagttgaggaagagaaggttgttgttatcactgggaagaagaagggtaagaaaggtaataagaanggtacgcaacaagatgatgatgatgatttttctganaaaggttcc

SEQ ID NO: 17716 - DNA, 436 bp, Arabidopsis thaliana
  unsure at all n locations
  Clone ID: LIB35-003-Q1-E1-G8
gcgtccgagcgagaagacgacagaagggggaggaaaagcaatccacacgattcgattcaaagttttcattttttctctaaaagtttggattttgatttcgttgctgaacggaaaaagaatcagctcctttcagtttagggttttgggtttctgtttggtctctatcagatgatgtgtgaggagattcttcctctgtttgtgtctgtttcagatggaagacaatgataagtctccccctaaggattactatangattctagaagttgattacgacgcaactgaggaattgatcagactcaattatcggaagcttgcattgaagtggcatcctgataagcacaaaggcgatagtgcanctacagaaaaatttcaagagatttaatgaagcttataatgtcctggtggaccctgcnaaacgttttggntatgaatttca

SEQ ID NO: 17717 - DNA, 450 bp, Arabidopsis thaliana
  unsure at all n locations
  Clone ID: LIB35-004-Q1-E1-B4
gcgtccgtacggctgcgagaagacgacagaagggcatgacgataagcacgatggtgtttatggatacccgcagcaggctggatatccagctggaaccggtggttatccgccacctggtgcatacccacaacagggaggttaccctggatatccgcctcagcaacagggtggatacccgggttatccgccacagggtccatatggttacccgcaacaaggttatccaccacagggtccatacngttacccgcaacagcaagctcatggtaaaccgcagaaaccgaacaancatggtaaggctggagctggaatgggactaggactgggcttggagctggtttattgggtgggttgttggttggttaagcggtttctgacatcgctgatatggggtgacatngggtgacatggggtnacatnggtnggnttccatttcngattgcctgtgtt

SEQ ID NO: 17718 - DNA, 478 bp, Arabidopsis thaliana
  unsure at all n locations
  Clone ID: LIB35-004-Q1-E1-B6
gcgtccgtacggctgcgagaagcgacagaaggggaagaacgataaacacagagctttctgttctttcgacatatcaaccgtttccttccttaatttgcgttcgttgtgaaaccatagatccaggtgaattctggaaaacatcttgaagcgaaatcgagacatcgttggaggatcaaaacgttaattcgattgatcgatgaatcctagaagggagcctcgtggtggtagaagttctctctttgatggcatcgaagagggaggaattagagctgctttttcttactctcatgagatcaatgaacatgggaatgagcgtgccttggagggattgcaagatagagtcattctcttaaaacgactatctggcgatataaatgaanagtcgatactcataaccgcatgcttgacagaatgggcaatgatatggatcatncangggatttctctcangaaccatggaccgccttaaaacggngtt

SEQ ID NO: 17719 - DNA, 414 bp, Arabidopsis thaliana
  unsure at all n locations
  Clone ID: LIB35-004-Q1-E1-B7
aagacgatagaagggggtccgcggtcgggaggaaagggcagcgataagccatgatgatacggggtggtggatccgcgtttgctaagtactgtcgaagagggatgtcatcatctcgagagttaccttcagagaatcatcagatggaggcgaatcgtggttttgccagttacgtatttaaaggggcagtcttttacacgtcatacgccatgagtatgtaattcgtagccgggaagaagatcatcatgcttctgcttctggttcccttggcgaggtaaaagaaagaaaatagtttgtttttggattttattttcaaaacccactagttggatcttcatgtntcaacatgatcatcgtttcantccgtcgatgacttcncaagncaagagagaatgaaacgaatcaatccctaatggg

SEQ ID NO: 17720 - DNA, 371 bp, Arabidopsis thaliana
  unsure at all n locations
  Clone ID: LIB35-004-Q1-E1-D10
tgacagtgttcttgtatatcttaagccctagaatggcatatcacttttcggaatgtgtggagagtcatgcatatgagacttatgataaatttctcagggccagtggagaggagttgacgaatatgcctgcaccggatatcgcagtaaaatactatacgggaggtgacntgtacttatttgatgagttccaaacatcaagaactcccaatactccgaagaccagtaatagaaaatctatacgatgtgtttgtgaacataagagatgatgaagcagaacactgcaagacaatgagagcttgtcagacnctatgcagtctgcgttctccacactccattttannagatgatgangctgaagaagaaccangggt

SEQ ID NO: 17721 - DNA, 420 bp, Arabidopsis thaliana
  unsure at all n locations
  Clone ID: LIB35-004-Q1-E1-D5
agaagggggaattcatgattcacaaaataaccaaaccttcaatttataatcgtttccaatcccaaaatcaagccatggacgccaagaacaccaaagctgatggagccaagaattttggtacgagtggcggaagcagtggttctggtagcacttccgacatcggtaaaacaatggttgctcctggatctggtggacgacaaagcgtttagagggaggcttttgagagcaaccctaagaagttctttgatgatcgtaacttcaaagagaagaaatgaaccgtttaaatgaagagcaagttctcaaaaagtgatgatatatcttgtttcttattttcgtctttgttagtgatcctcnaaaggctccactaattcacacatatggtgggagtgaagtnaaattattatcaataataagntaata

SEQ ID NO: 17722 - DNA, 454 bp, Arabidopsis thaliana
  unsure at all n locations
  Clone ID: LIB35-004-Q1-E1-D7
gcgtccgcgangaagacgacagaaggggatggagaagaaaggtatccgttcaaacacgattgtgtataatacgttgatggatgcttacaacaaatccaaccacatagaagaagtggaaggtctttttactgaaatgagagataaaggcttgaagccttcggctgcaacttataacattcttatggatgcttatgctagaaggatgcagcctgatatcgttgagacacttctgcgggagatggagcgatttaggtttanagccaaatgtgaaatcgtacacgtgtttgattagtgcgtatgggaggacgaagaanatgagtgatatggctgctgatgctttcctgcggntgaanaaagtaggtttgaaaccttcttcacattcntacacaggctcttaatcatgcttactcggttancggggtggnactaaaaaacttatgcttccctttgaaan

SEQ ID NO: 17723 - DNA, 464 bp, Arabidopsis thaliana
  unsure at all n locations
  Clone ID: LIB35-004-Q1-E1-E2
gcgtccggaagacgacagaagggaaactcaaaatccaaccacacacacaatttctcttcctctctaccattaacatcgatcagaaagaccgagagagagagggagaagctgattgattatggctgctgcttcgatttctgcaataggatgtaatcaaactttgataggaacttccttctatggaggatggggaagttccatctccggagaagattaccaaaccatgctctccaagacagttgcgccaccgcaacangccanagtctcaaggaaagcaatcagagcagttccaatgatgaagaatgtcaatgaangcaaaggcttatttgcacctctangttgttgtcacacgcaacctantangcaaggantaagtttaatcagctcangnggaaaaagccattgcccttacactcgcangtgattcactgagnttttgcaaaattccaattggnagcccaagg

SEQ ID NO: 17724 - DNA, 434 bp, Arabidopsis thaliana
  unsure at all n locations
  Clone ID: LIB35-004-Q1-E1-E8
gagagagagagnnnnnnnnnnnnnnnnnnnnnnnnnnnnnnnnnnnnnnnnnnnnnnnnnnnnnnnnnnnnnnnnnnnnnnnnnnntgacggctaaagaaacacagacatggcagcgattaaggaatctgttttcaacgtcgtcttcgtcttcgtcttcgtcggcgaagtggaagcgagttgagataataatgctgacagagatagtagacggagtagtttacaaggtcatgtatgtagttgaagctttcgttctcgtttccacgctctgcttcttctacctctgttgtggatgccacatttgatccaatttttgtttctctcattatantattctttccaattcatacttcctctcctatgggggttagtgttagtctcagttttatacaaataagcttaaaanttaaccnggatcattccaaccctggtntt

SEQ ID NO: 17725 - DNA, 418 bp, Arabidopsis thaliana
  unsure at all n locations
  Clone ID: LIB35-004-Q1-E1-E9
gcgtccgtacggctgcgagaagacgacagaagggggactcctcccagcgcttcaatatctcccaagacccaaccatcggagggagggggcgagatgatgggattgagttccttggtctttaccgagtttcacancctcggcttctctgaccttatagtttttgttgcgccactctggattgctgtggctgccggtgttttggttggttgggtttggaagcccaagtgggcttatctcgattctaaactcttgtccaattcacctaaattcctcaatcttcagcttcccacttccatcctcaaaacttcttctcaccacgttaaccccagcctttcttcnaaangagacaantgggtttgtnaanngacnatantttnggnanccagggagttggttggggtaaaanatggggcccctt

SEQ ID NO: 17726 - DNA, 413 bp, Arabidopsis thaliana
  unsure at all n locations
  Clone ID: LIB35-004-Q1-E1-F10
gcgtccgtacggctgcgagaagacgacaaaaggggcacaacaccatggaagtttcactaagcaactgaggcattacatttctgagttcgatcccaagatattgcggagatgcgcaaaaccaaggtcacatgaagcaaaaagcctgatagaaaagcagagtttagctctttttggtcctgaggaaagcagcaaagagagcattgtgacatcgttttctaagcctgaagaggttgcttcttgaggctgtggcgtttggtacgtttctatgggacacagaggagtatgtagatggcgcgtttaagctcaaggagaatgagaatgcagaggaagaaacaaatacantgtttgaagtatgtatgaaccagtttgctanaagaaaacttgaatancntttttggtggacattgccnata

SEQ ID NO: 17727 - DNA, 452 bp, Arabidopsis thaliana
  unsure at all n locations
  Clone ID: LIB35-004-Q1-E1-F3
gcccacgcgtccgtatcactctcgctttcttccattgttggaccatgcgagagctgatgaacagttatccgaatgggaaagagtgtttctcccaatcgatcccggtgttgttcttctcgacattgctttcgtccccgacgaacctagccgagggtttttacttggaacgagacagactttgttagagactaaagatggtggaagcacttggaatccacgttcgattccttcagctgaagaagaagatttcaattatagattcaattcgattanctttaaaggcaaagaaggatggattattggcaaacctgcgattttantgtacactgctgatgctggagagaattgggataggattcntctaagttcgcagcttcctgggagataatggtgtttatanaagngacaggaagantnagagtgnangagatggttactgatgaagggggcna

SEQ ID NO: 17728 - DNA, 447 bp, Arabidopsis thaliana
  unsure at all n locations
  Clone ID: LIB35-004-Q1-E1-F4
aagacgacagaaggggccctactcctaacaccagtcaaaaatcatctcaagatcagagcccagatcccaaaccgacgacaccaaccgggacgtcgtcgacaactcctgccgaagatagtagtacgacgtggtcaccggtagatacatcaatgatatacgaaggagctttggatcaaaacaaaggatcaccgtccacgtgtcatctttcgttatgtggaatcacagtcacacttgcgctggccttttgtcggatgtggcggctcttttgacacctaactttgtctcccgcgtaaaacactgaagaatgtgggccctcactgacgaaagccttatctcgttccggcccatgtgaaccggttattcccgaacgactcngattgggcanggttganaaaaaaaagtttacaagcacctacangttacgaaaaatatcctccatcaagntca

SEQ ID NO: 17729 - DNA, 424 bp, Arabidopsis thaliana
  unsure at all n locations
  Clone ID: LIB35-003-Q1-E1-D7
aagacgacagaaggggagatttagaaaaaaaggaagctccaagagatggcaagagttgttaaaatcgattctgcanagtcatggaatttctatgtgagtcaagccaagaatcanaattgtcccattgtggctcatttcactgcattatggtgtattccttctgtgtttatgaactccttcttcgaagagcttgcgtttaactataangatgctctgtttctaatagttgatgttgatgaagttaaggaagtggcaagtcaactagaggtaaaggcgatgccaactttcttgttcttgaaggatggtaatgcgatggacaaactcgtgggcgcaaaccctgatgagattaagaaacgggtcgatggtttcgttcagtcctcacgtgttgttcatantgcctaagagaaatttaaanattccaaca

SEQ ID NO: 17730 - DNA, 409 bp, Arabidopsis thaliana
  unsure at all n locations
  Clone ID: LIB35-003-Q1-E1-D8
tcgattgctcttcttcgtagtcgcctttgaattcgcagagtgagaagcaatgaaggtgagatcatctgtgaagaagatgtgtgagttttgtaaaacagtgaaacgtcgtggacgtgtgtatgttatatgctcttccaatcctaagcacaagcaaagacaagggttcagttcctttgcttatgaaggaattacaccttcccctttgtttgctgagccgattgctagtcaggagttggtgaggctgcctggtcagggggtatcagccggactggcatcacttttacacaaaaggcctatgccaacagcgtatttcggatggaggtctggtcttgcatccattctcttcaaacaaggaaattangatgtcagcatttccctttttaatcctcaaatttgtaacncaatttcc

SEQ ID NO: 17731 - DNA, 478 bp, Arabidopsis thaliana
  unsure at all n locations
  Clone ID: LIB35-003-Q1-E1-D12
gttacgcctgcccgtaccgncccnaaaattcccnngtcnacccacgcgtccgtacggctgcaagacgacagaagggggaaattgagagagagtagaacactaaattagtaaaatggctgcaaaagcatcaaatttagttgctcttcttctctttttgtttcttctgcttctatctatctcctcacaagttggactaggcgaggccaaacgcaacctacgtaacaatttgcgtttggattgcgtttcccatccctctcctcctcctcctcatcgttccatggcccctccaatttttgtaccggcttctacatcacacanaggacaaggcccataaacaaaatcatacaagtaaccgagaagaagtgatcaaaatttcataccaancnnnagaagtnatnaagattccatatangaagaaaagagtattgtgttangaagaaagggtcaaagattttcctttaacnggggccaagctttt

SEQ ID NO: 17732 - DNA, 293 bp, Arabidopsis thaliana
  unsure at all n locations
  Clone ID: LIB35-003-Q1-E1-E1
ttgttctcaaagaaaataagatatgaggttcggaaacttaacgctgagcagagacctcgaatcaaaggtcgtttcgtgaagaggacgtcacttttgacgtgatttgatttactttaatcaacactttaaagatcttgtaattaagacctttgaagtaattgtcgtaatgtactgaataatgaactgaaactcttggggccgatggttgtgtagacttgtagccggcaactatgattttatagattgattgattnnnnnnnnnnnnnnnnnnnnnnnnnnnnnnnnnnncggcc

SEQ ID NO: 17733 - DNA, 460 bp, Arabidopsis thaliana
  unsure at all n locations
  Clone ID: LIB35-003-Q1-E1-E12
ctgttacgcctgcctgtaccggnccnaaaattcccgngtcnacccacgcgtccgtacggctgcgaagaagacgacagaagggttacggctgcnagaagacgacagaagggctacggctgcgagaagacgacagaagggttacggctgcgagaagacgacagaagggctacggctgcgagaagacgacagaangnnnnnnnnnnnnnnnnnnnnnnnnnnnnnnnnnnnnnnnnnnnnnnnnnnnnnnnnnnnnnnnnnnnnnnnntggctagtggaatcnctcgtggtcgtttanctgaagagaggaaatcctggaggaagaatcatcctcatggttttgtggcaaagccgganacggggcacgatggaactgtgaatctaatggtgtgggcattgcactatacctggtaaanctgggactgaattgggaaaggtggatcctttccattaacgaatncca

SEQ ID NO: 17734 - DNA, 454 bp, Arabidopsis thaliana
  unsure at all n locations
  Clone ID: LIB35-003-Q1-E1-E3
tacggctgcgagaagacgacagaaggggaggaaccatgaaggttgacccgtctgcgtctccggaggtcgtatccgatctcccaccatcttccccaaagggctcacctgatcgccatgacccttccacttcttctccgagccccagtcgtggtggtgacaatcagtctgaagtcatatccaagagtatctgaatgtgacgaggaggggaaggtggaaatggtgggcgaaggggtaagttaaaaaaagcttaaaggaagcatgggtgaatctgacttcatttgtgaagaggcaaagcgggacaaggcaggttatagtattagcgtttgcagtaatcttactgatgcangtgacgatatggtgcctactgaaaaaaaggaagaagggggcaagtggaatttcatgaaaaggtacaacaagttcagtgttaaacngggaaaacntttgggttggttag

SEQ ID NO: 17735 - DNA, 413 bp, Arabidopsis thaliana
  unsure at all n locations
  Clone ID: LIB35-003-Q1-E1-E6
aagacgacagaagggggagtggagcatgttgaggtaaacttctacatccgtgggcctcaaggagcagggaaagtgtacacggagatgtttaaagacaaggcagagaaggaatggaaatacacgtacctgatcgtagagattttaacaccttccccagccaaattgatgctggagtcttatttgcctgcctaaagcactcgtatttatgactcagcagatccggaaaacattcagaaacggcttaaattgttttaattggggtgttggagaaaagagagagaatttgtgttacacatgagctgtangaatgacttcttatcaagcaactgtttgctaattgaaaaacaagtctaaactgtgaaaaaaaaaannnnnnnnnnanaaaaaaancggccgccctaaaggattaancc

SEQ ID NO: 17736 - DNA, 232 bp, Arabidopsis thaliana
  unsure at all n locations
  Clone ID: LIB35-003-Q1-E1-E8
ggctgcgagaagacgacagaagggtacggctgcgagaagacgacagaagggtacggctgcgagaagacgacagaagggtacggctgcgagaagacgacagaaggggatctctnnnnnnnnnnnnnnnnnnnnnnnnnnnnnnnnnnnnnnnnnnnnnnnnnnnnnnnnnnnnnnnnnnnnnnnnnnnnnnnnnnnnnnnnnnnnnnnnnnnnnnnnnnnnnnnnnncggccn

SEQ ID NO: 17737 - DNA, 412 bp, Arabidopsis thaliana
  unsure at all n locations
  Clone ID: LIB35-003-Q1-E1-F4
agaagggccacacaagttattttgatgggagccgttgaaggctacagagtcgcaggaaatgggccattgggagaggccgaggacttgctttaccccggtggcagcttcgacccattgggtttggctaccgacccagaggcattcgctgagttgaaggtgaaggagctcaagaacggaaggttggctatgttctctatgtttggattcttcgttcaagccatcgtcaccggaaagggacctttggagaacctcgccgaccatttggccgacccagtcaacaacaacgcttgggccttcgccaccaacttcgtccccggaaatgancggctgcttattatgtgaatgagaacanagaaagagatttgtttgtggtcaatccgtgtaaatttcgaacttcctttgggnaaccttg

SEQ ID NO: 17738 - DNA, 398 bp, Arabidopsis thaliana
  unsure at all n locations
  Clone ID: LIB35-003-Q1-E1-F7
gaagggggttcaccaaagagaagaagactaactgtgttttttttttctttcctcgatgcctagatcaagcagatgggtcaatcagcgagctacctctaagattaaaaaatttatactctttttgggtgtagcctttgtcttctacctctacagatacccttcttcgccatcgacggtggaacaatcatccacttccatctacaacatttccgttaaggatattgaagggaaagatgtgagtttgagcaagtttaccgggaaagtgcttcttatagtcaatgtagcctctaantgtggtctaacacatggaaactacaaagaaatgaacattctgtatgccaagtacaaaactcagggggtttgagatcttagcatttcttgcaaaccaatttgggant

SEQ ID NO: 17739 - DNA, 446 bp, Arabidopsis thaliana
  unsure at all n locations
  Clone ID: LIB35-003-Q1-E1-F8
gcgtccgtagcgagaagacgacaaaagggttaacgataaattgctggagccatatgagatagcaactgttgaagtaccagaggctcacatggggcctgttgttgaacttcttggcaaaaggcgtggacagatgtttgatatgcagggtgttgggtcggaaggaacaacctttctgcggtacaaaatcccaacacgtggacttcttggattgaggaacgcaattttaacagctactcgcgggacagctatccttaacactgtatttgacagttatggaccttgggccggtgatattagcacccgcgatctaggttcgctggttgcctttgaagatggaacatcaacatcatatgccctggcgagtgcgcaggagagagggcaaatgtttgtangttctggagtggatgtatacaaaggtcagatattgggatncaaccaaaaacccg

SEQ ID NO: 17740 - DNA, 424 bp, Arabidopsis thaliana
  unsure at all n locations
  Clone ID: LIB35-003-Q1-E1-F9
aagacgacagaagggggaaacaaaccaaaaaaaagcctaaaaagccgaccttttttctttctttctctcctctacctctcagcttctgctggatctctccagcagacacgatcttgttcggagagattcgtaggggaccgatctatcaaggcttcaagggcaaacagaaatggaccacgacaagacaggatgccaaagcccacctgaaggtcccaagctatgtactaacaactgcggtttctttggaagcgctgccacaatgaacatgtgttctaagtgtcacaaggatatgttgttccaacaggagcagggcgctaagtttgcatctgcagtgtctggaacatcgtcatcaancaacatcataaanggaaacctttacgccgcnttggtcgaaantgaaaccaatccgttaacccatggctgt

SEQ ID NO: 17741 - DNA, 438 bp, Arabidopsis thaliana
  unsure at all n locations
  Clone ID: LIB35-003-Q1-E1-G1
gtggccgtctccaacaccatttcgaagaccagggagatcgaagcaaaatggagaaaggaaagggaagaaaggaagaggtcgtgaccagggagtacactatcaatctccacaggcgcctccatagctgcaccttcaagaagaaggcacccaatgccattaaagagatcaggaagtttgcattgaaagcaatgggaacaaaggacgttagagtggatgttaaactcaacaagcagatatggagcaaaggtatccgaggtcccccgaggagaattagagtccgtgttgcccgtaagagaaacgatgatgaagatgccaangaagagttcttctccctcgtcaccgtcgctgagattccggctgaangattatccggtttgggtactaaagtcattgaanaaaaagggtgaaaaattggtgaatgtcactcacacaacctta

SEQ ID NO: 17742 - DNA, 440 bp, Arabidopsis thaliana
  unsure at all n locations
  Clone ID: LIB35-003-Q1-E1-G10
gcgtccgtacggctgcgagaagacgacagaaggggaaaggactgacgccgcgcgagaagacggcgcttcatgactgtttggagactattgatgagacgctggacgagctccatgaaacggtggaagatctccatttgtatccaaccaaaaaaactctccgggaacacgccggagatctcaaaacactaattagctccgccattaccaaccaggagacttgtctcgacggcttctctcatgacgacgccgataagcaagttcgtaaagccttgttgaaggggcagatacacgtagagcacatgtgcagcaacgctctagcaatgatcaagaacatgactgatactgacatagccaacttcgagcaaaaagctaaaataacctcaaacaaccgtaactcaaggaggagatccaggaactacggggctgttaaatatcnccgg

SEQ ID NO: 17743 - DNA, 500 bp, Arabidopsis thaliana
  unsure at all n locations
  Clone ID: LIB35-003-Q1-E1-G11
accgggcccgnaaattcccganagtcgacccacgcgtccgtacggctgcgagaagacgacagaagagtacggctgcgagaagacgacagaaggggggtcaaaacatgaaccaacattatccatcttccccggtgagacaaccgccatctcaacacgggttcgaatcttcagcagctgcagcggttgcagtgatgaaagcgagatcaaccgcctttgcgaaacgtagcttgagcttcaaaccagctactcaaacagcaccacagtcnaatctctcggattggggatctccaaacgggaagctggaatggggaatgataggagaagagctgaataagatgagaagaagtgtttcctttggaatccatgggaaacaacaacaataangcactagangactacaggggancgagccanatgtgtcatggggttaaccctttaggttaangaccattcggtggggttctgaaaanaacctttggaatgaatgaaaaggggtncgg

SEQ ID NO: 17744 - DNA, 415 bp, Arabidopsis thaliana
  unsure at all n locations
  Clone ID: LIB35-003-Q1-E1-G7
ttgcacgttgttaagccctctacgtcggtcgatgatgcgttggaacttctggttgagaagaaagtcacgggattgcctgtaattgacgataattggacactggttggtgttgtttctgattacgatttgcttgcattggactccatctctggtcgcagtcagaatgatacaaacttgttccctgatgtcgacagtacctggaaaacgtttaacgaactacagaaactgatcagtaagacatatggaaaagttgttggagacttgatgacaccgtctcctctcgttgtccgtgattctgccaatttagaagatgcagccaggttgcttctggaaacaaagttccgaagattacccgttgttgatgctgatggaaaactgattgggatcctacaangggaaacgttgtnaagggctg

SEQ ID NO: 17745 - DNA, 366 bp, Arabidopsis thaliana
  unsure at all n locations
  Clone ID: LIB35-002-Q1-E1-G12
tgggaatcgatttcttgtgtgtctgtagctacggattcgattcgagtgaccaaaggaactcgatttattggttctaaagtctccaaatcagaaaattcagagacgagccctaaatggcagctccggaagattcaaagatgtctccggcgaattcgtttggagctgtcgttctcggcggtacgtttgatcgattacacgatgggcatcgaatgttcctcaaggcggcggcggagctggccagggatcggatcgtagtgggagtctgtgatggcccaatgttgacgaaaaagcaattctctgacatgattcaacccattgaagaaaggatgcgtaatgtggagacctatgtcaagtctatcaancccg

SEQ ID NO: 17746 - DNA, 441 bp, Arabidopsis thaliana
  unsure at all n locations
  Clone ID: LIB35-002-Q1-E1-G4
gcgtccgtacggctgcgagaagacaacagaaggggatgggcaagtcggcaagacttcgccggagccagacctcatcgccggagaatgtcttgttgggtaaagatagctccgatgatccttacagatccgactcagagactgaatcaaactcgagctccgggaccgagtcgaacatgagctctgactctacaacttcggcaggagtgtcngcgatgatacgagtcttgtctgattctctgcttcgaacggaactcgcggagatggagatgatcaaggctcgtgaagcagcgaggttggaagctgagaagagaangttggaaatggaagtcgacttgactcagatggtgcttcagactcatttgcaagcgatgtcgtcgttacccgtcggagagcataagatttatcaggcacagaggaanaagaacagttagaccnttaagg

SEQ ID NO: 17747 - DNA, 454 bp, Arabidopsis thaliana
  unsure at all n locations
  Clone ID: LIB35-002-Q1-E1-H4
gggtcgaggnacgcgtccgtacgcgctgcgagaanacgacagaangggggaggagaaaaggtagtgccaatattanccggcgattcagatggagacngtggtcgataaagatgttctgaagtcttccggggctgagcttcttcccgacggacgtcgacgtttacncatccatgactgggagatctaaaccctccgcggnacgattctcacttctctcgctgtcgaatagtgggaaaaaaagcttaanacatctcacttacctgaaatggtttttggtgagaatgcattagtccttaaacacttgggtaacaccactaanattcattttaatgcgtttgacccactagctggttggaancaggaatggcttccanctgttgaanttcctgctgcaacacaatgngaaattcacgancaagccgtccagcangtnatactagantatgattcacgt

SEQ ID NO: 17748 - DNA, 157 bp, Arabidopsis thaliana
  unsure at all n locations
  Clone ID: LIB35-002-Q1-E1-F8
ggctgcgagaagacgacagaagggtacggctgcgagaagacgacagaagggtacggctacgagaagacgacagaagggtacggctgcgagaagacgacagaagggggtagagtactgtgnnnnnnnnnnnnnnnnnnnnnnnnnnnnnnnngcggcc

SEQ ID NO: 17749 - DNA, 421 bp, Arabidopsis thaliana
  unsure at all n locations
  Clone ID: LIB35-002-Q1-E1-H5
gcgtccgtacggctgcgagaagacgacagaagggggaagctangtccgagtagtcacttaaccggagatcggagactcatcgttgcancaacaacanatttcagaagatccgaanacnaaacgatgcctataagtgcgacaatggtcggagctttgctgggtctcggtacccagatgtactccaacgccctccgcaagctcccttatatgcgtcatccgtgggagcatgtggtgggtatgggacttggtgctgtgtttgcnaaccagctcgtgaaatgggatgtgaancttaangaanatcttgatgtnatgctcgctaaggctagagctgctaatgagcgccgttactttgatgaagatcgggattaantttgcgtgatcnttgangtcttcagagaanaaatatgtccnctgaactcat

SEQ ID NO: 17750 - DNA, 407 bp, Arabidopsis thaliana
  unsure at all n locations
  Clone ID: LIB35-002-Q1-E1-H8
aagacgacagaaggggaaggcaaaaaagggtaatttgaaaattttcagatagaaacagtcccgtcaccggcgacgatgaaatggttgctcgtcgccgtattgacctctcttacgatcttctccgccttaacacagtcccatctcctccatggatctccggtcaattctctctgcgctgatctcattcatcccgctaattactcctgcactgaacacagtattcaaacaaaggatggttacatattagctcttcaacgtgtagcttctcttggtccaagacttcaatctggtccacctgttttgcttcagcacggtctctttatggctggagatgtgtggttcttgaattcaccaaaagagtcactangtttcattcntgctgatcatgggtttgatgtttgggttgg

SEQ ID NO: 17751 - DNA, 450 bp, Arabidopsis thaliana
  unsure at all n locations
  Clone ID: LIB35-003-Q1-E1-A11
ccctgntgtaccgccccgagaattcccgaggtcgacccacgcgtccggaagacgacagaagggggggaaacaccaaaacaaatcaccggcgatcggaaaccggcgacgtaagctatgagcagtacggcagggaggctcgtgacttcaaaatccgagcttgacctcgatcaccctaacatcgaagattaccttccttctggttcttccatcaatgaacctcgcggcaagctcagcctgcgtgatttgctagacatctctccaacgctcactgaagctgctggtgccattgttgatgactcgttcacaagatgtttcaaatcaaatcctccagaaccttgggactggaatatttacttattcccactatactgctttggggttgttgttagatactgtatcctctttccctttgaaggtgctcaccttnacttttgggtggataatttccnt

SEQ ID NO: 17752 - DNA, 360 bp, Arabidopsis thaliana
  unsure at all n locations
  Clone ID: LIB35-003-Q1-E1-A3
aagacgacagaaggggggctaacaatggcgaagaagaaggaactgttatcaaaagcaccgtggagaggcgacgacgaagatgattccgataagtttagcaacgcaaagcttaaagtcacaaaggattctgatggtatgtcgaagatgcacgtccctagccgcggaaccaaaaaaggaagtctcgctgatgatgatgatgattcacttgagattgatcctcagcttcgttacagcttcaatccgcaactatcagttcctgcaaagtgtantcactatagacactttggtgaaacctcttcctccttcaatgggcattcaatgtctctcgcaacttggagcntcttcacccggcantttcaa

SEQ ID NO: 17753 - DNA, 512 bp, Arabidopsis thaliana
  unsure at all n locations
  Clone ID: LIB35-003-Q1-E1-B1
ctgtttacgcctgccngtaccgggtccgangaattcccggggtcgacccacgcgtccgtacggctgcgagaagacgacagaaggggagagtagagattgataaaaaaaatgagtagctccgattctcctcagcttcacaatatcttcgtctatggtagctttcaagagcctgacatcatccatgtcatgcttaatcgtattcctgagattgtctctgcaacacttcctggctttaagagatttaggcttaaaggacgtttgtatccatgtattatcccctctgagaatggagaagttcatgggaaaggtactaatgggattgactaatgatgaactttgagaatgtanattggggttgaaagaaacgaatatgaaagagtgtttgttgaagttgtaagaaaagacnattctgagaagatgagaattggaaacatatccaagggatnaacangaatgattctgaaanttggtggaaaatgggganttcnanngaatggaaaacgaattcncct

SEQ ID NO: 17754 - DNA, 376 bp, Arabidopsis thaliana
  unsure at all n locations
  Clone ID: LIB35-003-Q1-E1-B4
acgaatgctgaggatagagaagaagtagatgcaaaggaagaagaaggtcaaattgttggggannnnnnnnnnnnnnnnnnnnnnnnnnnnnnnnnnnnnnnnnnnnnnnnnnnnnnnnnnnnnnnnnnnnnnnnnnnnnnnnnnnnnnnnnnnnnnnnnnnnnnnnnnnnnnnnnnnnnnnnnnnnnnnnnnnnnnnnnnnnnnnnnnnnnnnnnnnnnnnnnnnnnnnnnncctgtgtttgtattatcctgtgatccgtccacttaagtttaactgggagatttaaggcaaaagacaaagttggtggcttcagcattaaattccatatacatggagattgtgggancaagtttcaaatataacaanttcctatgc

SEQ ID NO: 17755 - DNA, 461 bp, Arabidopsis thaliana
  unsure at all n locations
  Clone ID: LIB35-003-Q1-E1-B9
gcgtccgtacggaagacgacagaagggtacggctgcgagaagacgacagaagggtacggctgcgagaagacgacagaagggtacggctgcgaagaagacgactattgagagctaaaatccgagattaagaatggcgaatcaaggagcgaagaaacgaaaggaagagaacgccaaacacatggctaagctccgtcgtatcatcatcgcttccaatgctgtgtatttcgttgtgaggatgttgattttctactcaagctttacttggaaacattggatcggtttaagtgataacttcgctggcttacgcgtttccttataagcagcttgatcaaatggctaaacctagtgttactgatgatggtgagcttattgatggtgggatttgacatgaccactggggggaatctgcgggtaatttgcacgaagtcatccatatcacttgcnttgttcaactaacctcc

SEQ ID NO: 17756 - DNA, 284 bp, Arabidopsis thaliana
  unsure at all n locations
  Clone ID: LIB35-003-Q1-E1-C10
ggctgcgagaagacgacagaagggtacggctgcgagaagacgacagaagggtacggctgcgagaagacnacagaagggtacggctgcganaagacgacagaagggtacggctgcgagaagacgacagaagggtacggctgcgagaagacgacagaagggtacggctgcnangaagacgacagaagggtacngctgcgaagaagacgacagaaggggnnnnnnnnnnnnnnnnnnnnnnnnnnnnnnnnnnnnnnnnnnnnnnnnnnnnnnnnnnnnnnncggcc

SEQ ID NO: 17757 - DNA, 459 bp, Arabidopsis thaliana
  unsure at all n locations
  Clone ID: LIB35-003-Q1-E1-C12
ctgnttacgcctgctgtaccggcccganaattcccgangtcgacccacgcgtccgtacggctgcgagagacgcagaaggggggagcgattcggtcaaaaccaacgctggattacacagcagaagatttctcgtttcatatttcgacaaacttagaatctgcttatcatctgagccagcttgcgcatcctctgcttaaggcttcaggatgtgggaacataattttcatgtcctctattgctggagttgtatctgctagtgtcggctccatctactctgcaacgaaaggggcattgaatcagctagcaaggaacttggcatgtgagtgggctagtgatggcattagggctaatgctgtggctcctgcagtcatcgcaactcctttggctgaagctgtgtatgatgatgagttcaagaaagtggtgatatcaagnaaanccgttggggcctttccgggaanc

SEQ ID NO: 17758 - DNA, 404 bp, Arabidopsis thaliana
  unsure at all n locations
  Clone ID: LIB35-003-Q1-E1-C2
ggctgcgagaagacgacagaaggggacaatagttggagaagttgatgtaccagctgtcgtgatgaagctaaggaagctatgtaacacagagatcgtttcagtcgatgatgttaaaccacctgttaaaaagcctgaacctgagaaaccanctgaatctattgcatatcctgttccgatgaactacgcgtaccaattcaatcctgcctatgcaaattcttactatcatcaaccatacggaaattgtagantggtagacgaaccaaattgtgtgattatgtgattgttcnagtgttatttcaattaatgctcanttatntaacacttataagttttgatagaaantatgtaattttttccctaaaaaactgtttgtaataagttaattttttggtccaccngtggta

SEQ ID NO: 17759 - DNA, 231 bp, Arabidopsis thaliana
  unsure at all n locations
  Clone ID: LIB35-003-Q1-E1-C4
ggctgcgagaagacgacagaagggtacggctgcgagaagacgacagaagggtacggctgcganaagacgacagaagggtacggctgcgagaagacgacagaagggtacggctgcgagaagacgacagaagggtacggctgcnagaagacgacagaagggtacngctgcaagaagacgacagaagggcttttcacaaaaaaaaaatcgaataaaattaaaannaaaagcggc

SEQ ID NO: 17760 - DNA, 469 bp, Arabidopsis thaliana
  unsure at all n locations
  Clone ID: LIB35-003-Q1-E1-D1
ctgttaccctgcccgtaccggtccctaaattcncnggtcgacccacacgtccgcccacgcgtccgcccacgcgtccgcccacgcgtcngccnacgcntcngcccacgcgtccgtacggctgcnagaagacgacagaaggggttgcttaatgatcccagaatcccantagtagctctactcaaagtcaacacagctaccggaagaagattcgagtctctcggaaatggnnnnnnnnnnnnnnnnnnnnnnnnnnnnnnnnnnnnnnnnnnnnnncgagaaatcagacggcggagaagggaaggcgtcgtgggtggggaaggacgggaaggtgtaccatagccacgatggactcgcacctcactcacacgaacccatctactctcctggctacttcagtcgccgagctcctccgcttcacgaaccgtaacttccctgagaaaacttttaccgtcggtaatggcggtcccnt

SEQ ID NO: 17761 - DNA, 417 bp, Arabidopsis thaliana
  unsure at all n locations
  Clone ID: LIB35-003-Q1-E1-D11
gaagggtacggctgcgagaagacgacagaaggggagcaaagagaaggagaaagcgaaaccaaaaatcgacattaatggctgacgaagattacaacgacgtcgatggcttgggatatgaggatgagccagcagagcctgagattgaagaaggagtagaggaagatgttgaaatgaaggagaatgatgatgtcaatggtgagcctattgaagctgaagataaagtcgaaacagaacctgtgcaacgtccacgcaaaacgtcaaagtttatgaccaagtatgagcgtgctcgtatcctcggcactcgcgctttgcagattancatgaatgctcctgtcatggttganctaaagggnaanacggntcacttgaaattncannaagggagcttaaggcagccggaagataccattcactant

SEQ ID NO: 17762 - DNA, 422 bp, Arabidopsis thaliana
  unsure at all n locations
  Clone ID: LIB35-003-Q1-E1-F5
ccctgtcaatggctcgcttcgtcagatgtctgagaagaacactcttttctaattcgtctccttctattgctcaccggagccctaggattggtttgcccacgaatctaaatcctaaaattttaatcagccgcagatgtctgagctccgggagttacgtctcagaaatgcagaaatcagctttccagggcaacattttgcgactgatccgtaatgagattgagtacgaactcgatcactcgcctcctcttcagcctcctaacagttttggtccattcactgtggatgaacggcctggagagcagtggattagcttgaaaaggaattttgggggataaagaggacatcaanaattgaagcaactatgtttgatagatcagttccccacggtcaaaatctaccaaaactgaanctgaataattcct

SEQ ID NO: 17763 - DNA, 458 bp, Arabidopsis thaliana
  unsure at all n locations
  Clone ID: LIB35-017-Q1-E1-G4
ctcttcgcttctagggtttcatcaaccaaattcgctttcgccgcctttccacaagcaatcatggtgctccaaaacgacatcgatctccttcatccgccacctgagcttgagaagagaaagcataagctcaggcgtctcgtgcaatctcccaactccttcttcatggatgttaagtgtcagggatgcttcaacataaccactgtgttcagccattctcaaactgttgtggtatgtggaaactgtcagacagttctgtgccagcccaccggtggtaaaagcgaggctacaagaagggacgctccttcaaggaanaagttgagaattgagatttcncgaatccgttcaacccttccgcaaaatgtttttgccttantaagttttggataacctaatgancgttttttcngcctaatganaanaattttggatggcnagggtaaaacctaccaaacctgggt

SEQ ID NO: 17764 - DNA, 417 bp, Arabidopsis thaliana
  unsure at all n locations
  Clone ID: LIB35-018-Q1-E1-E1
agacggaagaaaattcgaatcatcagtgtttgtttcctcctctcttaaagcttagcccttctcaggtcattgttcttcaatggcttcgagcaacacgactactggggttgataatacgtttagaaagaagtttgatgtggaagagtttaaggagcgtgctcgtgaacgcgaaaagaaggaatcggatcggtctaaatctcggtccaaaggtcctcctgtgcaaagagcccctttgaagcatagagattatcatgtagacctagaatctcgtctgggcaagacacangtcgttacaccggtagcgcctctaaagtcagcangctgggttaattctgtcncgtttgtgaantgtgttgttaaagattcggcaaactacttggatcacataaatgggaaaaaacatcaaanggcattggg

SEQ ID NO: 17765 - DNA, 420 bp, Arabidopsis thaliana
  unsure at all n locations
  Clone ID: LIB35-009-Q1-E1-A10
gggaagatctccttgctgcgagaaagaacacatgaacaaaggtgcttggactaaagaagaagatgagagactagtctcttacatcaagtctcacggtgaaggtcgttggcgacctcttcctagagccgctggtctccttcgctgcggtaaaagctgccgtcttcggtggattaactatctccgacctgatctcaaaagaggaaactttacacatgatgaagatgaacttatcatcaagcttcatagcctcctaggcaacaagtggtctttgattgcggcgagattacctggaagaacagataacgagatnaagaactactggaacacacatataaagaggaagcttttgagcaaagggattgatcaagccactcatagagggatnaacgangcaaaaattctgatttgaagaaaacaaag

SEQ ID NO: 17766 - DNA, 389 bp, Arabidopsis thaliana
  unsure at all n locations
  Clone ID: LIB35-021-Q1-E1-F10
aggaactctcttccttgcaaaaaaataaaacactatttcctccaaatacacgtagagagatacatatatacatatagagatcaacaaagatgggaagatcaccatgctgcgagaaagctcacatgaacaaaggagcttggactaaagaagaagatcagcttcttgttgattacatccgtaaacacggtgaaggttgctggcgatctctccctcgcgccgctggattacaaagatgtggtaagagttgtagattgagatggatgaattatctaagaccagatctcaanagaggcaattttactgaagangaagatgaactcatcatcaagctccatancttgctcggtaacagatngtcnttaatagctgggagattaccaggangcatc

SEQ ID NO: 17767 - DNA, 419 bp, Arabidopsis thaliana
  unsure at all n locations
  Clone ID: LIB35-049-Q1-E1-F4
agggttcgtccaaagggctgcgaaaaggtgcttggactactgaagaagatagtctcttgagacagtgcattaataagtatggagaaggcaaatggcaccaagttcctgtaagagctgggctaaaccggtgcaggaaaagttgacgttaatcctccatgccttggacttaacatcaataatgtttgtgacaatagtatcatatacaacaaagataagaagaaagaccaactagtgaataatttgattgatggagataatatgtggttagagaaattcctaagaggaaagccaanaggtagatattttggttcctgaagcgacgacaacagaaaanggggacaccttggctttttgaccgttgatcaacctttggagtccntttcgattggagaanactgtgaaaattggattantggttt

SEQ ID NO: 17768 - DNA, 263 bp, Arabidopsis thaliana
  Clone ID: LIB35-054-Q1-E1-H3
aggaagagagagagagaaagatgggtaggcctccatgctgtgacaagatagggatcaagaaaggaccatggactcctgaagaagatatcattcttgtttcttacattcaagaacatggtcctggaaactggagatcagttcccaccaacactgggttattgagatgcagcaaaagttgtagactgagatggacaaattatctgagacctggaattaaacgtggaaactttactcctcatgaagaaggaatgatcattcacttg

SEQ ID NO: 17769 - DNA, 397 bp, Arabidopsis thaliana
  Clone ID: LIB35-052-Q1-E1-G6
cataaaacatttattttgcgcctataaaggcatttcagctccaccgtaggaaactttctcttgaaagaaacccacagcaacaaacagagaaaatgtgtggcggtgctattatttccgattatgcccctctcgtcaccaaggccaagggccgtaaactcacggctgaggaactctggtcagagctcgatgcttccgccgccgacgacttctggggtttctattccacctccaaactccatcccaccaaccaagttaacgtgaaagaggaggcagtgaagaaggagcaggcaacagagccggggaaacggaggaagaggaagaatgtttatagagggatacgtaagcgtccatggggaaaatgggcggctgagattcgaagattcacgaaaaggtgttt

SEQ ID NO: 17770 - DNA, 400 bp, Arabidopsis thaliana
  unsure at all n locations
  Clone ID: LIB35-053-Q1-E1-A2
ctancggtttcgcgcgtanccctagccagagcagcacgctcnactgtgcttctcctccgacgttagttgtgccttcagcgacggctgggaatgttcccccgcagctcgagcttantctcngcggaggaggcggcggctcgtgttatcanatcccgatgtcncgtcctgtctacnttttggacctgatggggatcggtaacgtacagtcgtggtcagcctcctcctgtgacatcggcgtctanatcgccggtggtgcatgttgcnacgaatatggnttgtggtgcccaaagcnactctgattcgtcatcggtcgttgatttcgaangtgggatggagaagagatccanctgttagatntagatctnaatttgccncctccatcggaacaagcctgagcntt

SEQ ID NO: 17771 - DNA, 367 bp, Arabidopsis thaliana
  unsure at all n locations
  Clone ID: LIB35-005-Q1-E1-D2
cggctgcgagaagacgacagaagggtacggctgcgagaagacgacagaagggtacggctgcgagaagacgacagaagggtacggctgcgagaagacgacagaagggtacggctgcgagaagacgtcagaagggtacggctgcgagaagacaacagaagggtacngctgcgagaagacgacagaagggtacngctgcgagaagacgacagaagggtacggctgcnagaagacgacagaagggtacngctgcnagaagacgacagaaggataccgctgccaaaagacgacagaanggtaccgctgccagaagacnacanaangataccgctnccaaaaaacnacagaagggtacggntccaaaaaacca

SEQ ID NO: 17772 - DNA, 201 bp, Arabidopsis thaliana
  unsure at all n locations
  Clone ID: LIB35-006-Q1-E1-A10
aactgtcnccctggcactacaagtccggncatcccgggtcgacccacgcgtccgcccangcgtccgtacggctgcgagaagacgacagaanggtacggctgcaagaagacgacagaagggtacggctgcaagaagacgacagaagggtacggctgcaagaagacgacagaaggatacggctgcgagaagacgacagaaggg

SEQ ID NO: 17773 - DNA, 72 bp, Arabidopsis thaliana
  unsure at all n locations
  Clone ID: LIB35-007-Q1-E1-C10
gtggtnntaccangacgacgatacgtnntggttcctngaggacgacnttgggatccngggtcgaattgacga

SEQ ID NO: 17774 - DNA, 73 bp, Arabidopsis thaliana
  unsure at all n locations
  Clone ID: LIB35-009-Q1-E1-C4
ancagataaaaaaaaaatggctcaagcaatgacttcgatggctggcttacnttgagcatctcaagctgtccct

SEQ ID NO: 17775 - DNA, 176 bp, Arabidopsis thaliana
  Clone ID: LIB35-010-Q1-E1-E6
gacgacgaaaaaaatgatttaaaaaactatttttttccgtaaggaagaaaagttatttttatgttttaaaaaggtgaagaaggtccagaaggatcaacgcaaatatataaatggattttcatgtattatataatttaattagtgtattaagaaaataaaacagatgttgaagttta

SEQ ID NO: 17776 - DNA, 370 bp, Arabidopsis thaliana
  unsure at all n locations
  Clone ID: LIB35-014-Q1-E1-E9
gaangaaaaacanaatggcttcgatgggtggattacacggtgcatctccggcggttcttgaaggaagcttaaagatcaatggctccagccgtctgaatggctctggaagagtggcggtggctcaaaggtctagacttgtcgtcagagctcagcagagtgaggagacttctcgccggtccgtgattgggcttgttgctgctggtttagctggtggctcgtttgttcaggctgtcctcgccgatgctatttcgatcaaagttggccctcctccagctccttccggtggccttcctggganagataactcagaccangcaagagactttgcattggcattgnnanacnggttttacttacanccattgccacc

SEQ ID NO: 17777 - DNA, 70 bp, Arabidopsis thaliana
  unsure at all n locations
  Clone ID: LIB35-015-Q1-E1-E1
tgntagcaacngttcttgggatnttctccnacacgcctctctccatgtttcaatctttgtacccgttccn

SEQ ID NO: 17778 - DNA, 405 bp, Arabidopsis thaliana
  unsure at all n locations
  Clone ID: LIB35-016-Q1-E1-H10
atagatgagaagaaaagaaaacgcaagttatcaaaccgcgaatctgcaaggaggtcgcgtttgaagaaacagaagttaatggaggacacgattcatgagatctccagtcttgaacgacgaatcaaagagaacagtgagagatgtcgagctgtaaaacagaggcttgactcggtcgaaacggagaacgcgggtcttaaatcggagaagatttggctctcgagttacgttagcgatttagagaatatgatcgcctacgacgagtttaacgcctgaacgcnnaatggtgggtggccaantgttgtcnaacgattcngaacggcaaaacgcccgggaatnnccggttgggagaattgttaaaccgtttcaaccgtnggaaaatttgaagtttgttgggtcccctaccaa

SEQ ID NO: 17779 - DNA, 414 bp, Arabidopsis thaliana
  Clone ID: LIB35-027-Q1-E1-E6
ttcgatcttatccttatcttcttccttgttctatttctcttctaactaatctcttctcttctcttaaaatcaaacgtaatcataaataaagatcttcttgtttaatttctcttgatcctcgcaaaatcacagattcttgaaattcttttttcttgtcttgaaattcttgagttcttgagttatgaaaagacaatggacagagttatgaaatgataaatctcaaccaattccttgtttatcattctatatcagttgtgattcttcattggttttacgttatctcttgaacaaaaaaacatggcaaacgcagagaagacaagttcaggttccgacatagatgagaagaaaagaaaacgcaagttgtcaaaccgcgaatctgcaaggaggtcgcgtttgaagaaacagaagttaatg

SEQ ID NO: 17780 - DNA, 336 bp, Arabidopsis thaliana
  unsure at all n locations
  Clone ID: LIB35-034-Q1-E1-H12
gattatgagtgagatcagcgaacttcagaaaaagggaatgcaattgatggatgagaacaagcggttgaggcagcaaggaacgcaactaacggaagagaacgagcgacttggcatacaaatatgtaacaatgtgcatgcacacggtggtgctgaatcggagaacgctgctgtgtacgaggaaggacagtcgtcggagtctattactaacgccggaaactctaccggagcgcctgttgactccnagagctccgacacttcccttangctcggcttaccgtatggtggttagagatggaacaattcaaagaagttgatggantgaggaaagtatgttaa

SEQ ID NO: 17781 - DNA, 424 bp, Arabidopsis thaliana
  unsure at all n locations
  Clone ID: LIB35-022-Q1-E1-G2
ttccagaaagaaagaaaaaaaagaaacaaataattccaaaaccttctctcttaatcgaaatcaagaaacttacaagatctggtggaaaccatggaagaaggagattttttcaactgctgtttcagcgagattagtagtggcatgaccatgaataagaagaagatgaagaagagcaataaccaaaagaggtttagcgaggaacagatcaagtcacttgagcttatatttgagtctgagacgaggcttgagccgaggaagaatgttcaagtagctananagctaaggctgcaaccaagacaagtggctatatggtttcaaaacaaagaagggctcgatggaaaactaagcaacttgaagaaagagtntaacactcctagagccaanttcaacaatttggcntcacaattttgaaatcatgaanaaa

SEQ ID NO: 17782 - DNA, 382 bp, Arabidopsis thaliana
  unsure at all n locations
  Clone ID: LILIB35-013-Q1-E1-F11
ttccagaaagaaagaaaaaaaagaaacaaataattccaaaaccttctctcttaatcaaaatcaagaaacttacaagatctggtgaaaaccatggaagaaggagattttttcaactgctgtttcagcgagattagtagtggcatgaccatgaataagaagaagatgaagaagagcaataaccaaaagaggtttagcgaggaacagatcaagtcacttgagcttatatttgagtctgagacgaggcttgagccgaggaagaaggttcaggtagccagagagctanggctgcaaccaagacaagtggctatatggtttcaaaacaagaagggccgatggaaaactaagcaacttnaagaaaagatttaacactcctaaagncaat

SEQ ID NO: 17783 - DNA, 392 bp, Arabidopsis thaliana
  Clone ID: LIB35-042-Q1-E1-G11
gcgcgggtcgacgcaacaccctatactgagtcgtaataaccacagaagggcaggaatgatgacaattaaccttgacctaaagagaggaggaaacggaaggttcttgaaaactgcggcttacggacactttggaagagacgaccctgacttcacctgggaagtcgtcaagccactcaagtgggacaaacctcaagcttaaattttacctactctgtttctgtcttcattccacaaaccaattatctgctcacttttttatttctctgtttttgtggtttattgtgtttatgtatcattgtacttgagctatttcaattgggtgtttgtttttatggcgacttttacacggcttggagtaagtttcatgttgttcttatataattataaccatg

SEQ ID NO: 17784 - DNA, 423 bp, Arabidopsis thaliana
  Clone ID: LIB35-052-Q1-E1-D8
cccacgcgtccgcccacgcgtccgtacggctgcgagaagacgacagaagggggaagccatgggaagaagaaaaatcgagatcaagcgaatcgagaacaaaagcagtcgacaagtcactttctccaaacgacgcaatggtctcatcgacaaagctcgacaactttcgattctctgtgaatcctccgtcgctgttgtcgtcgtatctgcctccggaaaactctatgactcttcctccggtgacgacatttccaagatcattgatcgttatgaaatacaacatgctgatgaacttagagccttagatcttgaagaaaaaattcagaattatcttccacacaaggagttactagaaacagtccaaagcaagcttgaagaaccaaatgtcgataatgtaagtgtagattctctaatttctctggagga

SEQ ID NO: 17785 - DNA, 202 bp, Arabidopsis thaliana
  Clone ID: LIB35-039-Q1-E1-A3
gacgattcgaaataacaacagaaggacgatggaatctagcagaatttttcttcctaataactattttcgagctttctgtttttgttctttctttttaaaaaacttattaagttcttatgaataatgacttgtgaagtttgagttcgtctccttcacaagcaagttgtattggtgttttctactttatgaatatgggttttat

SEQ ID NO: 17786 - DNA, 366 bp, Arabidopsis thaliana
  Clone ID: LIB35-004-Q1-E1-H9
tacggctgcgagaagacgacagaagggggaagccatgggaagaagaaaaatcgagatcaagcgaatcgagaacaaaagcagtcgacaagtcactttctccaaacgacgcaatggtctcatcgacaaagctcgacaactttcgattctctgtgaatcctccgtcgctgttgtcgtcgtatctgcctccggaaaactctatgactcttcctccggtgacgacatttccaagatcattgatcgttatgaaatacaacatgctgatgaacttagagccttagatcttgaagaaaaaattcagaattatcttccacacaaggagttactagaaacagtccaaagcaagcttgaagaaccaaatgtcgataa

SEQ ID NO: 17787 - DNA, 442 bp, Arabidopsis thaliana
  Clone ID: LIB35-043-Q1-E1-F9
tacagctgcgagaagacgacagaaggggagagagagagagagagaaacgaagaaaaaaaagaagcaaaaaacattgtgggtctccggtgattaggatcaaattagggcaccagccttatcggaggaagaagccatgggtagaaaaaaagtcgagatcaagcgaatcgagaacaaaagtagtcgacaagtcactttctccaaacgacgcaatggtctcatcgagaaagctcgacaactttcaattctctgtgaatcttccatcgctgttctcgtcgtctccggctccggaaaactctacaagtctgcctccggtgacaacatgtcaaagatcattgatcgttacgaaatacatcatgctgatgaacttgaagccttagatcttgcagaaaaagctcggaattatctgccactcaaagagttactagaaatagtccaaagcaag

SEQ ID NO: 17788 - DNA, 243 bp, Arabidopsis thaliana
  Clone ID: LIB35-011-Q1-E1-A10
tccaagcgtcagtacggctgcgagaggactacagaaagggcttaggagcagatttctattaatgaacaaaggtgcttggactaaaggaagaagatgagagactagtctcttacatcaagtctcaaggtgaaagtcgttggcgacctcttcgtagatccgctggtctcattcttatgctgtcatagctgccgtcttcggtggcttaaatatcgccgacctgatttcattcagaggaagtttatt

SEQ ID NO: 17789 - DNA, 432 bp, Arabidopsis thaliana
  Clone ID: LIB35-030-Q1-E1-C8
tacggctgcgagaagacgacagaaggggctctctcctctgttctctcttcccttatcttcttcttatactcttcgaccaacgaagaaccctagaaatcgattaacaagatgaatagggaaaagttgatgaagatggccaacactgtccgcactggcggaaaggggacagtaagaagaaagaagaaggctgttcacaagaccactacaaccgatgacaagaggctccagagcactcttaagagagttggagtcaattccattcgcgccattgaagaagttaacatttttaaggatgatgtactcattcagttcattaaccctaaagttcaagcttcaattgctgctaacacatgggttgtgagtggtacaccacagacgataagattgcaagacattcttcctcagattatcggccaacttggaccagataac

SEQ ID NO: 17790 - DNA, 386 bp, Arabidopsis thaliana
  Clone ID: LIB35-042-Q1-E1-B7
accacagaaagggagctcaagcttctacgtcatcttcgacatgagaatgtggttgctcttaaagatgtaatgatggctaatcataagagaagctttaaggatgtttatcttgtttatgagcttatggatactgatcttcatcagattattaagtcttctcaagttcttgcaattgacgattttgatgaaaatgagctccaagaggctgacaaaatgataaaggaggaggggaagtttctgtgtgtgtcaatgggacatgagaacaagacacttgatgattttgtagaagctcacaacacatgcgtgaatgatctcatgtatttccccactcgaagcgcttacgagctctcaggtgttgctgggaacgcggacaaagttgcagcttt

SEQ ID NO: 17791 - DNA, 424 bp, Arabidopsis thaliana
  Clone ID: LIB35-043-Q1-E1-H9
tacggctgcgagaagacgacagaaggggaaccaaaaagcttttcttcccaacacacacaaaaaaaaaaactgtaacgaccaagaaaaaagaggacgcgttagaagaaaaaaaagaacaatccgataaaaagatccggcgatgtcaaacccgacccgtaagaatatggagaggattaaaggtccatggagtccagaagaagatgatctgttgcagaggcttgttcagaaacatggtccgaggaactggtctttgattagcaaatcaatccctggacgttccggcaaatcttgtcgtctccggtggtgtaaccagctatctccggaggtagagcaccgtgctttttcgcaggaagaagacgagacgattattcgagctcacgctccgtttggtaacaagtgggctacgatctcgcgtcctctcaat

SEQ ID NO: 17792 - DNA, 413 bp, Arabidopsis thaliana
  Clone ID: LIB35-005-Q1-E1-F1
tacaactgcaagaagacgacagaagggggatcttttgatccaatcacaaggcaaagatccaatggacaataacaacaacaacaacaaccagcaaccaccaccaacctccgtctatccacctggctccgccgtcacaaccgtaatccctcctccaccatctggatctgcatcaatagtcaccggaggaggagcgacataccaccacctcctccagcaacaacagcaacagcttcaaatgttctggacataccagagacaagagatcgaacaggtaaacgatttcaaaaaccatcagctccctctagctcgtatcaaaaaaatcatgaaagctgatgaggatgtgcgtatgatctccgccgaagcaccgaatctcttcgcgaaagcttgtgagcttttcattctcgaacttacga

SEQ ID NO: 17793 - DNA, 370 bp, Arabidopsis thaliana
  Clone ID: LIB35-045-Q1-E1-B6
tacagctgcgagaagacgacagaagggggatcttttgatccattcacaaggcagtgatccactggacaatcacaacggcaacatccagcatccagcactcaagtccgtctatcgacctgggtccaccgtcagaagcgtaatcgctcctccatgatctggatctgcatcaatattcaccggatgaggaccgacatagtaccacctcctccagcagcaacatcagcagcttcatctgttctggacagaccacagacaagagatcgaacaggtaaacgatttcaagaaccatcagctctctctaggtcgtatcaggaaaatcatgacagctgatgaagatgtgcgtacgatctccgctgaagcaccggttctc

SEQ ID NO: 17794 - DNA, 219 bp, Arabidopsis thaliana
  unsure at all n locations
  Clone ID: LIB35-015-Q1-E1-H12
tacagctgcgagaagacgacagaaggggcagcaattaaacaatttcttcactgcaattcacacgcaaccttcaaactaaaactcgagagacaagaaatcctcagaatctttaacttaatggcgctcgaagctcttacatcaccaagattagcttctccgaatcctcctttgttcgaagattccntcagtcttccatggaagtccaacgccgggcaaagg

SEQ ID NO: 17795 - DNA, 453 bp, Arabidopsis thaliana
  unsure at all n locations
  Clone ID: LIB35-043-Q1-E1-A2
cccacgcgtccgtacgctgcgagaagacgacagaaggggacgtcgcggtagagagaaagagaggaaagcttaagccgacgacgacgacgaagatgagagagacggtgaagttgataagcatggaaggtttcgagttcgtcatcgacagagaagccgctatggtttctcagactatccgaagcatgctcacttctccaggtggtttctcggaatcgaaagatggcgtagtgactttccctgatataagcaccacaatactagagaagatttgccagtacttctattggtctcttcaatactctagaggcanagagacagagtttcatattgagcctgaactgactctagagctgatgatggctgctaactatcttcacacttgaagaatgaaaaggataacgctgttgaatcctagtcgacttgtgtgaaatcaaaaggtaaatccgcattggg

SEQ ID NO: 17796 - DNA, 431 bp, Arabidopsis thaliana
  Clone ID: LIB35-002-Q1-E1-H6
cccacgcgtccgtacggctgcgagaagacagaagggggccggagtcatgattggacggagtgtccatacgctcatcccggagaaaaagctcgccggagagatccgaggaagtaccattactctggtacggcttgttctgattttcgtaaaggtggctgcaagaaaggtgactcttgtgagtttgctcatggtgttttcgagtgttggcttcatccagctcgttaccgtactcagccgtgtaaagacggtggtaactgtctccggaaaatttgtttctttgcccattcaccggatcagcttaggtttttacatactcggagccctgacagagttgattcttttgacgtttcgtctccgattcgtgctagagcatttcagctgtcgatttctccggtttctggttcgccaccgatgagtccaagagctgactc

SEQ ID NO: 17797 - DNA, 425 bp, Arabidopsis thaliana
  Clone ID: LIB35-042-Q1-E1-H4
accacgcgtccgtacgcagaagacgacagaaggggaaagcaaaacacagaaaaagccattctttttgccccttgagtgctttcagctcttcccacaaggttacagaagtaatgtcacgtgtgtacgtcggaaatttggacccgcgagttactgagcgtgaacttgaggatgagttccgtgcctttggagttgtcaggagtgtttgggttgcccgtagaccacctggttacgcttttctagatttcgaagatcctagggatgcccgtgatgctatccgtgctttagatggcaagaatggctggagggttgaacagtctcacaatcgaggtgagcgtggtggcggcggtcgtggtggtgaccgtggaggtggtggcggcggccgtagtcgcactcctccaagatacagaaggagcctaagctatgga

SEQ ID NO: 17798 - DNA, 411 bp, Arabidopsis thaliana
  Clone ID: LIB35-005-Q1-E1-A1
tacggctgcgagaaaacgacagaagggggcggtagagagaaagagaggaaagcttaagccgacgacgacgacgaagatgagagagacggtgaagttgataagcatggaaggtttcgagttcgtcatcgacagagaagccgctatggtttctcagactatccgaagcatgctcacttctccaggtggtttctcggaatcgaaagatggcgtagtgactttccctgatataagcaccacaatactagagaagatttgccagtacttctactggtctcttcaatactccagaggcaaagagacagagtttcatattgagcctgaactgactctagagctgatgatggctgctaactatcttcacacttgaagaatgaaaaggataacgctgttgaatcttattcgacttgtgtg

SEQ ID NO: 17799 - DNA, 327 bp, Arabidopsis thaliana
  Clone ID: LIB35-026-Q1-E1-H4
tacggctgcggacgacagaaggggacagagacggagatggtctcatatctcaacttgagttgggagaaggaatgaaggacatggggatgaagataacagcagaagaagcggagcatatggtccgagaagccgaccttgatggcgatggttttctttctttccacgaattctctaaaatgatgattgctgcctcttgttagcattttgtgaaatgccatgatttaagagtttgtttttgcacaattacaactatatttcaatatgttactatattttcccaacatataattaaagtgtgtgttactgtaaaaaaaacataacacagtc

SEQ ID NO: 17800 - DNA, 394 bp, Arabidopsis thaliana
  unsure at all n locations
  Clone ID: LIB35-056-Q1-E2-D2
cgtaattcacgataactatgagctcaaggccagagaggcttctgcacttaagaagatcgaagagttatctaagttgctagaagaagcttcttccacacatgagaaaggggaagagattactaataccaatccttttgataacagtaccggagaacaaaaagtacaagaaagtcctttggaagctattgatagacatttgaaagatgacacaacaattcattggtcagctcacaacgttcaagtaataggaaaaggagagaaaggtaaagataaagacaccgtggaaagcgaagtgtatcatttagaaaagagagaagcttcttcagagagagacacagagcatgactttgctgaagaaagaagtccactcnaaagcagaaggtatgagaacntt

SEQ ID NO: 17801 - DNA, 405 bp, Arabidopsis thaliana
  unsure at all n locations
  Clone ID: LIB35-056-Q1-E2-D3
ttgtaacggcaagaagcttangtgtcctgctaagtgtttcaaatcttttcgccgcagccgatggaacaccgttccgtgagagaaaacatggtttgtatctttgagagttacgccggagatattgggtggcgtcactccgaaagccccatcaccggtataccgataagggaatgagaccaaaagtggacgctagtgggtacgaatggcagcttcggtaggtaactatgattacatcattgattacgaattccaaactgatgggcttataaaagctaangtcgggctaagtggaatactaatggtgaaagggacaacatatcaaaacaaaaaccaagtgggagaaagataaagacngtaatgaagaaaaacttcacggaacccttctgtctgnaaaagttaattggg

SEQ ID NO: 17802 - DNA, 396 bp, Arabidopsis thaliana
  unsure at all n locations
  Clone ID: LIB35-056-Q1-E2-D4
ggctgcgtcagtaaaacgtattcttaaaagcaaccattggtgtgattgactctataagagaattcgtcagcgtgaagcaatctccaatctaatcgcagcatatcttctccgattcctattcgtctctgcaattgaatcttccggtaagcgaagatggcgacgtctgcgaggatttgttgcggaggaggaagtgcatgcgccgttcgttgtgatcgtcgcacgttaaatttgaattctcgatcgtcatgtgttgttccaagtgacgaatccgacggaatatgtgtgcgatcgggaagatttcgatgtcgatggaggatttgtcaccaccgtctgcggcggtgaagattgaanggatcngtgggaanggaaacgccgtgggtntgttgtgtccaaggg

SEQ ID NO: 17803 - DNA, 405 bp, Arabidopsis thaliana
  unsure at all n locations
  Clone ID: LIB35-056-Q1-E2-D5
gagcttaagcaagcacttgacgctgatatacaagatcggatcatgaaggagagagagatgcagagttatatagaagagcgtgagcgtgaagtcgctgagcgagaagctgcctggaaagttgagctctctcgccgtgagacggagatcgctagacaggaagcgaggttgaagatggagaagagagaatctgggagaaggagaagagtgttcttatggggactgcgtcgaatcangataatcaagatggtgctctgggaaattactgtgagtggtgagaaatatcggtgtcttagattctctaaggctaaagaaatgangttggaaattggatctggattctaaatttaaggcacaaaaggaaaagatttgttcctgcntttaataatggatccaatggggaantgt

SEQ ID NO: 17804 - DNA, 486 bp, Arabidopsis thaliana
  unsure at all n locations
  Clone ID: LIB35-056-Q1-E2-C9
tgtttacgcctgggccggtaccggtccaaaaattcccgggtcnacttcttctcccccngctgcggtggctgccgcgctctccaccccaaggtagaaattcttggccaaaagccccggttcgatccaacaattctgattccaaacactgcaaagtatactcaagcgaattcggttcttctgatgtgcagattgcgcagttcgctgagcggaatccggacgtgctgttcctgcaagtcaactacgagaagcacaagtccatgtgctacagcctccatgtccatgtcctccctttcttcaggttctacaggggagctcagggcagggtcagcagcttcagctgcaccaatgcaaccgtaagtctcacttgtatactgtaaaacgtttctgcttactacaaaaatgttcttcatacacgtttaagatgagatgaatgctgacatgcttgctgcaattcgattcgattacagatcaagaagttcaaggacg

SEQ ID NO: 17805 - DNA, 246 bp, Arabidopsis thaliana
  Clone ID: LIB35-056-Q1-E2-D9
ctcctccccgtcgcgtcccggccccggcaggccgacggtgccgttgctccgtcttctcccgcgtttatgttcctagatacaaacctgtgatgcatgcgttccgtgttcttcttcctttgtagtgtggatgtttgagatcgcgatccggatttcgctagcgttctgttatcacttacctgcttcagatctagttcgagtaaaataggtctttatgcgataaagatcatcatgaacactgttcctgca

SEQ ID NO: 17806 - DNA, 406 bp, Arabidopsis thaliana
  unsure at all n locations
  Clone ID: LIB35-056-Q1-E2-E10
taataccatgaaattagggtttacgaagcttttaatcgtctctccttcccaatttcttccaagaatggccgacgaagaagattctctctctcaattcgatatatccaaagaggaaacggataagttagtttcagaggtgattagattcatactgttcaagtttcaccaaagctcaggaactccaattaaaagagaagatttgactcagattgttactaagaactatcgtcaacgaaatctcgctacacacgtgattaacgaagcgaagaagaagctctctaatgtctttggttatgatttgaaagaacttcaacgtgctcgttcttcttctactggtcaatctaggcttcctcagtcacaagagttctgttgactcgaaatcgtatgtgcttgttantgaattgcc

SEQ ID NO: 17807 - DNA, 493 bp, Arabidopsis thaliana
  unsure at all n locations
  Clone ID: LIB35-056-Q1-E2-E11
tttacgcctgnacgtaccgngtccganaattcccgggtcnacccacgcgtccgcncacgcgtccgcccacgcgtcngcccacgcgtccgcccacgcgtccgtacggctgcgagaagacgacagaaggggagctagaacatgattacgccgatttttacaaaagttgtgtacaatgagagagcgtggcatatccgtccgctatcggtttacaacaggggatttgaggagaaggctgagagaggaaagaaagcgaacattgatgaggctgaatgcctcaaatggcttgactccaagaaaccaaattcagtcatttatgtttcctttgggagcgtggctttcttcaagaatgaacagttattcgaagatcgctgcagggttagaagcttccggtacaagtttcatttgggttgttaggaaaaccaaagatgataganaagaatggttaccaaaanggttcgaaganaagggtgaaaaggaaaagtatgataataaa

SEQ ID NO: 17808 - DNA, 430 bp, Arabidopsis thaliana
  Clone ID: LIB35-056-Q1-E2-E9
tctctgcacttaaatggagccactagtgctcctcggttagctgaagacgatgaaaattctgttgctagcgacttgcattgctttgagttgaacatgcatggagatgctgtgcagactcatgaccttgcaggaactcgacgaacagtcgcggactgcatgtattcaccaatgagaagactggagttttccgatggtgtgtctgttgagggctcaaggatctcaaccgcaaggcctcgttcagaaaaaggcaaggtgaagccaagcagcagcaaagcacagctgcatacttcgacaccagaaatcagctctcgcaactgtgacaagatcgatcctatagatgagcagaatgaaacagtcatgacccaagtctctcgacggttgcacgatgacttgctgaagatcaaatcagaggctcctcagcatgcatttc

SEQ ID NO: 17809 - DNA, 391 bp, Arabidopsis thaliana
  unsure at all n locations
  Clone ID: LIB35-056-Q1-E2-F8
gaagagaggtttatgatttgagcggaagctgctgagagaggaaaatcatggaggatcatcatcatcttcccgagaatttgaaacccttctttcacagagccactgaagctcaggagcgattggctaagcttgaagctgctcttgcgtcgactaagacagacattccggatgctaaacttgtggaggaaaacaaacaacttcagtcaaagctcgaagaagctaacgccactgtgaagcaagaacagactaaggtgaaggacttgaccattgaaaacgccaagcataagtaccgtatattgcatcttgtgcggggctctaaaggatgctgatcaagaagcttgagaagctctctaaatgatttcantctccgtccctttttttaatccctccc

SEQ ID NO: 17810 - DNA, 439 bp, Arabidopsis thaliana
  Clone ID: LIB35-056-Q1-E2-F9
cggtctttctcgttagggtaacatgggtgcttcggcggcagtttgtcgggaaaaagatggccagtaactcggagcatttgcggtgattttcgacggtctagtagatgcgccaagtcttgaagcgtacgcatgcaatgaagcactcgctctcgccatagatttctacatatcacatgtgataatagcctcagattgtatgcaggtcatctcagacatcaaccagggcacacaatcctcttattcaatggtcctcgatgagattaaatatactccctccgttcctaaatataagtctttttagacatttcaaatggactacaacatacagatgtatgtagacacattttagagtgtagattcacttatttcgctccgtatgtagtcacttgttggaatctctagaaagacttatatttgggaacggagggagtagaatgca

SEQ ID NO: 17811 - DNA, 352 bp, Arabidopsis thaliana
  unsure at all n locations
  Clone ID: LIB35-056-Q1-E2-G11
ctgnangtgtcactatcaagaagacaaaccaagctttggtctttggcttctacgatgaaccaatgactggaggtcaatgcaacttggttgtcgaaaggctcggggattaccttatcgagtctgaactctaaaaccaaggtttcatttcaggttcttcttaactaaagagtgtcaatgcactttttattgtgattgattgtaatgctttcaaacacaaatcatttgttactttagaaccaattgtgattgattggtctccttcgttaccgagtttgagtttgtgtgttcttgtaatgacatttgatcatcttttttccccataatgtattgagttttgatcaaaagaaaaaag

SEQ ID NO: 17812 - DNA, 376 bp, Arabidopsis thaliana
  Clone ID: LIB35-056-Q1-E2-G5
ggtcgcagtgaccaggcccgggcgactgtttaccaaaaacacaggtctccgcaaagtcgtaagaccatgtatgggggctgacgcctgcccagtgccggaaggttaaggaagttggtgacctgatgacaggggagccggcgaccgaagccccggtgaacggcggccgtaacaataacggtcctaaggtaaccgaaattccttgtcgggtaagttccgacccgcacgaaaggcgtaacgatctgggcactgtctccggagagaggctcggtgaaatagacatgtctgtgaaagatgcggactacctgcgcctggacagaaagaccctatgaagcttcactgttccctgggattggcttttgggctttcctgccaactt

SEQ ID NO: 17813 - DNA, 401 bp, Arabidopsis thaliana
  unsure at all n locations
  Clone ID: LIB35-056-Q1-E2-G7
ttaaattcgatttttgagacaaagctcgacaagtcgtcggcggcggtgtaaaaatagtcggagctatggcgatgcaggccggagttggcttatccaggatctttctcttagccggagcaggttacactggtacgattatgatgaagaatggaaaattgtcggatttgttgggtgaattgcagagtttggtgaagggaatggagaaatctggagaagggtctgagggaggttctgatgtttctgatgctatagctgcacaggttcgccggttggctatggagattcgacagctagcttcgcagcaacacataacggtcatgaatggagtttctggtgcaaacctacaagcccttgctgttccaactgccggcattgggaactctcgggtaanggtatatgtg

SEQ ID NO: 17814 - DNA, 487 bp, Arabidopsis thaliana
  unsure at all n locations
  Clone ID: LIB35-056-Q1-E2-G9
ctgtttacgcctgnccgtaccggtccanaaattcccgggtccacgacggcctgaacnctgcccctcctccccttcaccaagcggaggggggtacgtccggatctgtaaccagcggtgaggatagaaagccagtgttttttgaagggagagagaaagtgttactacccctatcttttttagatctggagaggatgagagtgtgtgaatagagcaaccctagcaagcaagcgcggaggctccggcctatatatacatagtggggtagttttcctttttcactccatcaaaacaatcgtttaaaattgtgtactactacatgccaggtcgtggtttttttagttgttgattgttttttgagatagctacccgcttgttccaagtggtgttacggtgtgccaggtcgcactttgtatcgttcaaagtctggtactacaagtccctccattaaatgaacaaccaacccctcgtaaaaattgtgaacaagccc

SEQ ID NO: 17815 - DNA, 435 bp, Arabidopsis thaliana
  Clone ID: LIB35-056-Q1-E2-H9
tcgttctagggcccgtattgctacacaatatgttcccctttgagaggttcatgggagtcctaaagaaatatgtccgtaaccgcgctaggccagaaggaagcatctccatgggccatcaaacagaggatgttatcgggtttcgtgttgacttcattcctggccttaagaagataggtctccctaaatcgcggtatgaggggagactgactggaaaaggcactcttggaagtgactcaataatatgcagggatggatattcttggtctcaagcacactacacagttctacagaactctaccttggtgaccccgtatgtcgatgaacacaagaacagtctgcgctccaaacacccggagtagtgcgatgactgggattacatgtgaacacattaggactttcaacagttggttggaaacatgtctcagaggtgacaac

SEQ ID NO: 17816 - DNA, 223 bp, Arabidopsis thaliana
  Clone ID: LIB35-038-Q1-E1-A7
ttcgccggtcgacccacgcgaccgaacggctgcgagaagacgacagaagggtacggctgcgagaagacgacagaagggtacggctgcgagaagacgacagaagggtacggctgcgagaagacgacagaagggtgtctgaaaaaaaaaaaaaaaaaaaaaaaaaaaaaaaaaaaaaaaaaaaaaaaaaaaaaaaaaaaaaaaaaaaaagaaccggccacacgat

SEQ ID NO: 17817 - DNA, 338 bp, Arabidopsis thaliana
  unsure at all n locations
  Clone ID: LIB35-056-Q1-E1-D8
gaagagatcgagagaagaatagtttgatcatcttgtgagaaaaataatggctgcttcagtgatgctatcttcggtgacattgaaaccagctggtttcacggtggagaagacggcggctaagagggattaccgtcgctcaacaaagaactccgtcccctccctgtcaanaatttgtccgccaagttggcgtcaaanaaagatnaangacccgacaagccctttcggaattaaacggcagcatggacttgaaggggacnggcgtcnaacgcctccggcagaaagggcaangggataccggtgtttacaagtacgtcgacaaggtatggagctaacgtcga

SEQ ID NO: 17818 - DNA, 320 bp, Arabidopsis thaliana
  unsure at all n locations
  Clone ID: LIB35-056-Q1-E1-E4
agagatcgagagaagaatagtttgatcatcttgtganaaanatantggcngcttcagtgatgctatcttcggtgacattgaaaccagctgggtttcacggtgngaganaacngcggctaagaggattacccgtccgctcaacaataagctcctccctccttcaaaattgtcgccaagtggcgtcaaaaagatcaagaccgacaagcccttcggaattaacgggcagcatggncttgagggacngcgtcgacgcctccggcagaaagggcaaagggatacggtgtttacaactacgtcgacaagtatngagctaacgtcga

SEQ ID NO: 17819 - DNA, 294 bp, Arabidopsis thaliana
  Clone ID: LIB35-056-Q1-E1-G3
ggtcgcagtgaccaggcccgggcgactgtttaccaaaaacacaggtctccgcaaagtcgtaagaccatgtatgggggctgacgcctgcccagtgccggaaggttaaggaagttggtgacctgatgacaggggagccggcgaccgaagccccggtgaacggcggccgtaacaataacggtcctaaggtagcgaaattccttgtcgggtaagttccgacccgcacgaaaggcgtaacgatctgggcactgtctcggagagaggctcggtgaaatagacatgtctgtgaagatgcgg

SEQ ID NO: 17820 - DNA, 322 bp, Arabidopsis thaliana
  unsure at all n locations
  Clone ID: LIB35-056-Q1-E1-G7
ttaaattcgatttttgagacaaagctcgacaagtcgtcggcggcggtgtaaaaatagtcggagctatggcgatgcaggccggagttggcttatccaggatctttctcttagccggagcaggttacactggtacgattatgatgaagaatggaaaattgtcggatttgttgggtgaattgcagagtttggtgaagggaatggagaaatctggagaagggtctgaggggaggttctgatgtttctgatgctatagctgcacaggttcgccgggttggctatggagattcgacagctagcttcgcagcancacataacggtcatg

SEQ ID NO: 17821 - DNA, 406 bp, Arabidopsis thaliana
  unsure at all n locations
  Clone ID: LIB35-056-Q1-E2-A10
aagttgtgggcaggttanatcaaaacggtggagagtgaagtgtcacttgtcacctgtaaaatccgccaagtattcctctaaaatatcaaccgatatcgctctccacgagtctcctcaggccttgtttgatgaatatttggaagacaaatcaagggttttcgaagcaatgtttccggataaacccaaaaactataggcttaatgaggaagaatggagaatccaaatgttaccaataaaatttttcttcctcactgcgtgtccagtggtggtcatgcggattanatgcaaatccaacggtcaggattacccatcagacgtacctctacacataaccaaagttcttgagctcaacatgacgaaatgggagcttcaagggcttgaccgataatggaaccaactgatttca

SEQ ID NO: 17822 - DNA, 343 bp, Arabidopsis thaliana
  unsure at all n locations
  Clone ID: LIB35-056-Q1-E1-D7
tgttgattcgcaaaggcgaagattatccatcttctcagttactcctactggaaccaaaagctcagaaccttaaaacatggagtctctatctcttcccgttctaaatcctctgttagcttctggttctaatctttttagaaaccagcactcgaggatgacctcttcantggtatcttcacttaaatcccccattggaggcacatcgctctccactgttcgtcgctttgggngtaaggtgtttgttaggatgcaaagctgttgatgaagatattgatttngangcaaatgagagacatagctgctgcnaaaaaatcgtttgnggattggtttgttaagggaaagg

SEQ ID NO: 17823 - DNA, 406 bp, Arabidopsis thaliana
  Clone ID: LIB35-056-Q1-E2-A11
gttctttttaaaatcaaggaatctagtttttggaatatttttaacaatttttattgacaatttaaattctaatctatttgaaaactcacaaccattctgaaattaagagcaagacggctattttagatcatcaaacaatcaaatctgttctccgtgttgattggaggcgtacgacagacgctcctcttctctgtcgttactctggctttgttctcttgcataggtggttttgaccgttgagaagatgaagaagatttgttgggcttctcaagttaagttgacattgggcttgttaggtgagtggcccaatatcccttttcctttgtttactgcagcgacgtcgttctgactcgttgacccttcatctgcatttgaagtttttctccgatctgtgtcaaattccggg

SEQ ID NO: 17824 - DNA, 65 bp, Arabidopsis thaliana
  unsure at all n locations
  Clone ID: LIB35-056-Q1-E2-A2
cngctgccaanaagacgacagaangattccgcttccaagaanacgacagaaagggtaccggctgc

SEQ ID NO: 17825 - DNA, 391 bp, Arabidopsis thaliana
  unsure at all n locations
  Clone ID: LIB35-056-Q1-E2-A8
gatttagaaaaaaaggaagctccaagagatggcaagagttgttaaaatcgattctgcagagtcatggaatttctatgtgagtcaagccaagaatcagaattgtcccattgtggctcatttcactgcattatggtgtattccttctgtgtttatgaactccttcttcgaagagcttgcgtttaactataaggatgctctgtttctaatagttgatgttgatgaagttaaggaagtggcaagtcaactagaggtaaaggcgatgccaactttcttgttcttgaaggatggtaatgcgatggacaaactcgtgggcgcaaaccctgatgagattaagaaacgggtcgatggtttccgttcaatcctcacgtgttgttcatattgcttaanggaa

SEQ ID NO: 17826 - DNA, 423 bp, Arabidopsis thaliana
  unsure at all n locations
  Clone ID: LIB35-056-Q1-E2-A9
caagcaatttgctgtggttgagaatcctggattttggaactggacctttacccttattgatgaanatgaaaatgtgttggcccaaattgaccgtaattggaggggaattggttttganctctttacggatgctggccantatgcaattcggtttggtgatgatggacaaagcagtagacttggtctcggttcagatatcnaagaactaaacgttgttcgcccgctgagtttacctgaaagggctgtagctcttgctctggcagtgtccctggactcagattacttctctangagagggggctggggactgccttttctcatcgccacanagtagaccncgcatacgaatgccatcctctcagttcacagcggnacttaaaattgccagttctttccgccattgatgtcctgaanaaagctggt

SEQ ID NO: 17827 - DNA, 399 bp, Arabidopsis thaliana
  unsure at all n locations
  Clone ID: LIB35-056-Q1-E2-B10
tttgtaatatgtatgggaagttttgtaaccaagtgggtgaaggaattgcgagcgctttgtttgcttgcattggaatggttttgatctcttgcatttcggctttcggtgtctttcgtttgtacggcggaagcaaatctaggccaagctcacggtagtgaaggcctgtagtggtcttggaccaaccttgtttgtggaacctctattaaatgttgtggtgtgtgtcctcttatctctcaagtgtgtataccgctattacttactgtcatgatctcagctgatctnnnnnnnnnnnnnnnnnnnnnnnnnnnnnnnnnnnnnnnnnnnnnnnnnnnnnnnnnnnnnnnnnnnnnnnnnnnnnnnnnnnnngcggccnccctaaaggatccaancttaagtacg

SEQ ID NO: 17828 - DNA, 404 bp, Arabidopsis thaliana
  unsure at all n locations
  Clone ID: LIB35-056-Q1-E2-B11
nctctgctcagtcaagctgcacaaacgcgttgattagcatgtcgccgtgtctcaactacataactggaaactctacctctcctaatcagcaatgctgtaatcagttgagtagagtagtccagtcttctcctgactgtttgtgtcaagtccttaacggtggaggctctcagcttgggatcaatgttaaccaaacacaagctcttggtctgcctagggcttgtaatgttcagactcctcctgtcagtcgctgtaataccggtggtggtggtggtggttctacttctgactctcctgcagaatcaccaaactcttcaggaccaggtaatggatcgaaaaccgtaccagtaggagaaggagacggacccccatcgtctgatggaagctctatcaagttctcanttcct

SEQ ID NO: 17829 - DNA, 415 bp, Arabidopsis thaliana
  unsure at all n locations
  Clone ID: LIB35-056-Q1-E2-B3
aaaaaanaaaaaacacaaaaaatttcaatggccgcctcaacaatggctctctcctcccctgctttcgccggaaaggctgtgaacctttcccctgcggcatcaagaagtccttgggaagcggccgtgtgacaatgaggaagactgttgccaagccaaagggtccatcaggcagcccatggtacngatccgaccgagtcaagtacttgggtccattctctgggcgaagtcacccagctaccttaccggagagttccctggagactaccggatgggacacaactggtctatccggctgaaccccganacattcgcaaaggaaccgtnagctaaaattatccacagcaagtggggcaagctcnggagccctaagntngcgttcttccccggacctttgggnaaagaaacggggtccaat

SEQ ID NO: 17830 - DNA, 406 bp, Arabidopsis thaliana
  unsure at all n locations
  Clone ID: LIB35-056-Q1-E2-B5
cgtctctcttcgacggaaccacaaggttgtacacaagctacgtttgcccatttgctcaacgagtttgggatcactccaaacttcaagggtttgcaagaaaagattaaacttgttcctttggatcttgggaatangcctgcttggtacaacgagaaagtatatccagagaacaaggtgccancgcttgagcacaatggaaaaatcattgggggagagtctggatttgattaaatatcctgataacacttttgaagggccttctctttaccccgangatcatgcaaatacanagtttggggacnagtttgctcaaagtnatactgatacttcgntnaanacnaatgtangtngtcactcancangngaccctcctnnaagaaaccccaccctggggtttaggaattna

SEQ ID NO: 17831 - DNA, 409 bp, Arabidopsis thaliana
  unsure at all n locations
  Clone ID: LIB35-056-Q1-E2-B7
gcccaaccgcgcatacgatcgtcgacatcatggcggcaagagcccactagccaccccccccgaaccattgcgcctgggaccaataatccgccaagatgattcacatttcccgaagagaacccgattgtagttccgattccgacaaggtctctccgtttccacgtgtctgacagtccggaatgccgtttccatgctttgcgatccgtacatgccgacgcggcgcgattgggagatttccggatttgcaatatcagcccgggtcgacatctcntcccacgatgtgtgaccgtcgttctcatggtgcattctgtgcttcaacgcgcaatggactccngaatcccgatntcgctgggccgttcnaaaaagggaccctggattccgtctgaacccctggggcgtcatganattg

SEQ ID NO: 17832 - DNA, 432 bp, Arabidopsis thaliana
  unsure at all n locations
  Clone ID: LIB35-056-Q1-E2-B9
agtanacctctacaaggtcgagccatgggacctcccggcaaggtcgcgcctccgcagccgcgactcccagtggtacttcttcagccgcctcgaccgcaagcacgccaaccgcgcgcgcaccaaccgcgccactgcaggaggctactggaagaccaccggcaaggacagggaggtccgccatggagctagggttgtcgggatgaagaagacgctcgtcttccacgctggccgcgcgcctaagggcgagcgcaccaactgggtcatgcacgagtatcgccttgagggcgatggtgcagccgggatcccacaggattcatttgtagtgtgccgaatcttccagaaggctgggcctggtcctcaaaacggggcacagtatggagctcccttcgtcgangaggantgggaagcggatgaaggatgatgattttggtc

SEQ ID NO: 17833 - DNA, 138 bp, Arabidopsis thaliana
  Clone ID: LIB35-056-Q1-E2-C10
gatgaatcgattttatagctccgatattgttattcatgatatttctttcattcgatatcatcgcaatctaattcatctgagtaagtttacaagcgaaagatttctcatctctatgggattaaatcccgagatattcca

SEQ ID NO: 17834 - DNA, 407 bp, Arabidopsis thaliana
  Clone ID: LIB35-056-Q1-E2-C12
tcagccggcgatcagagtcaaacgaacgattaccagttaaagataaagaaaagcaaaagcgttccaaacgcggatcgtgcggcgtcaagaagctggagtttcagcgatccagaatcgcggaggaagagaagagtcgctggctacaaagtttattccgttgaacagaagatgaagggatccattcgaaagagcttcaaatggttcaaagacattatcggtatttcttgatataccttctctcaactttcttaaaatctcttctttgtgctgtgagagttaaatatatctgtaacgaacaaaaaattgatagtattttctttctcttgcaactatatgtagaagaagagtctttgaacttgaatgagacagataatgaatgaaatcagttttcaatatccaaaaaaaaa

SEQ ID NO: 17835 - DNA, 403 bp, Arabidopsis thaliana
  Clone ID: LIB35-053-Q1-E1-E2
ggtctttgggactctgctactgccacatctcacgatcttttggctcgtttggctatagagcattgcgttcacgaggctagagggcttgatgtactgcccacaacgatatctcggttcaggaatggaggcgataacgagacagcagatttactagcgaaagttgcgtaccctgaagaaatcactcactgtgcagctggagtaaaatggtttaagtatctatgtgaacggtccaaggatcctgaattcaccatcagcagcaaagaatcagatgatagcaatgaagagataatcaacaagtttcattcggttgtaagggggcatttcagaggaccgttgaaaccgccttttaatgctgaagcaagaaaagctgctggctttgggtcctcaatggtatgaacctctt

SEQ ID NO: 17836 - DNA, 406 bp, Arabidopsis thaliana
  unsure at all n locations
  Clone ID: LIB35-053-Q1-E1-F1
cacagaaacaatccaaaggtgagatctcttatagtttcgagattcgaggaagacttttggatacgatcagcttcagtcttccacaacttaacattgctcanggtgttggatctttctanggtaaagtttggaggagggaagttaccttctagcattggagggctcatccacttgagatacttgagcttatacggagctgtggtatctcatctaccttctactatgcggaacttaaagcttctgctctttttgaacttacgtgttgataacaaggaaccgattcacgtgccaaatgttttgaaagagatgctagagttgaggtacctttccctacctcaagaaatggatgataaaaccaagttggnattgggtgatctagtgaacctggagtacttgtggnaattct

SEQ ID NO: 17837 - DNA, 393 bp, Arabidopsis thaliana
  unsure at all n locations
  Clone ID: LIB35-053-Q1-E1-F10
aagctttggattccatcacagaggttgtgcaaactataagacatcgtaagtctcaagttcaggaatccgtgagcaatgacactatggtaaagcctgatagttctactacacctacacctggtagacaaacaagacagtcagatgaggcttcaaagtctttcaggacacctggacgtgtttctactccaacggggtcaaagctcaaaagctcgaataacaggcatgaagatcttttacgtatggaacccgaagaattgatgttgagcacagaagtaatagggcagagggacagttgggacctatcggatagagaaagggatatacgccaagggattgatctagctaccactcttgagcgcatanagaagaaattctcatcantgattctcgtcc

SEQ ID NO: 17838 - DNA, 390 bp, Arabidopsis thaliana
  Clone ID: LIB35-053-Q1-E1-F8
aacaagtatgttgatgactttgttctcctttaaattatcatcacttcatttctcagagatttacgcacacagagttctcttcttcgtcctagtttcttctattccaggtgagaagaaaaaatggcgtttgtgaccactgcggaagtgtgtgacgcgaatcaagagatgattcgaagtggccagctccgagctctgcaacccgtttttcagatttatggtcgtcgtcaaatattttcaggtccagtagttactgttaaagtctttgaagacaatggcttaatccgtcacttcctcgaagagaaaggcaatggtagagttcttgtggtggatggtggagggagtttacgctgtgcgatactaggaggaaacccggtcgtacaagcgcagaac

SEQ ID NO: 17839 - DNA, 386 bp, Arabidopsis thaliana
  unsure at all n locations
  Clone ID: LIB35-053-Q1-E1-E10
aagagaagaagcaacttatcgaccttaggaacagtgctgatacaacaatttacagtgtagagaagagcttgagtgaatacagagagaagattccagctgagattgcctctgagatcgaaactgcagtgtctgatctcaggactgctatggctggtgaggatgtcgaggacatcaaggctaaggtcgaagctgcaaacaaggcagtgtcgaagatcggagaacacatgtctaagggatctggatcatctggttccgatggaagctctggtgagggtacaagtgggactgggcagacgcctgaagctgaattcgaggangccagtggttcaaggaagtgangttgccgctaaccggttccatacanaaatcanggttttccccccata

SEQ ID NO: 17840 - DNA, 393 bp, Arabidopsis thaliana
  unsure at all n locations
  Clone ID: LIB35-053-Q1-E1-G1
agaaattaaaagtgttcttgttgctgtanaacacanacagaacanncaaagaatcaattgaagagtctctcagtcgttaggggaagcanatatagaaatggctanctttactgcctcngcttccaccgtctccgccgctcgtccggctctccttctcaagcctaccgtcgccatctctgntcctgttcttggtttgcctccaatgggtaagaanaatggaggagtgagatgttcaatggatacaaagcaangaaacntctcantcatgggggctggaatttcagctgcagcaacagctgctttgacggcngtgatgagcaatcccncgatggctttgggttgatgataagatgtcaacacaaggaacacgattaanctttggtctaagcaaca

SEQ ID NO: 17841 - DNA, 408 bp, Arabidopsis thaliana
  unsure at all n locations
  Clone ID: LIB35-053-Q1-E1-G12
gtccgangacgcgtgggcggacgcgtgggcggacgcgtgggcggacgcgtgggtgaagtacagctcttgttacttctcaaacgattcaagtagcttagaggatgcagaggaagcaattttggctctttattgtgaaagagctaaagtggaagatggtcaaagtgttcttgatatcggatgtggctggggatccttgtctttgtacattgcacgcaagtacagcaaatgcaagttaaccggtatctgcaactccaaaacgcagaaagcatttatcgatgagaaatgccggtaactaagtttctcatacatcttaagcttcgagttctagctgctacaaatggaacttaatataatctcaaatggtttgaaggaaactcgggcttcaaaatatccaaatcaatgtcnccg

SEQ ID NO: 17842 - DNA, 62 bp, Arabidopsis thaliana
  Clone ID: LIB35-053-Q1-E1-G3
acgacagaagggctcatcgcatctttttaaaatatataaaaatacgagtgtgtgttgattga

SEQ ID NO: 17843 - DNA, 387 bp, Arabidopsis thaliana
  unsure at all n locations
  Clone ID: LIB35-053-Q1-E1-G5
gaagaagcagtaacaaatttggtgaagtcacgagaatcaacgatgacggcgacgaacaagcaagtcatattgaaagactacgtgagtggtttccctacggaatccgatttcgatttcactaccaccaccgtcgaacttagggttccggaaggtactaactctgttctagtgaagaatctctacttgtcatgcgatccttacatgagaattcgcatggggaaacctgatccttccactgctgctcttgctcaagcttacactcccggccagccaatccaagggtatggagtgtcnaaaataatagaatctggacatccanattacaagaaaggagatttactccggggtataattgcatgggaagagtacaatgttatcactccaatg

SEQ ID NO: 17844 - DNA, 302 bp, Arabidopsis thaliana
  unsure at all n locations
  Clone ID: LIB35-053-Q1-E1-H10
tgtttagaattaananaanngaangcaaaagagtcagagccgcctagagaaatcgatcacaaattcagaagaaaagaacagagaacacagaggaagaggtgagatggaggaacttgtagggcttctgagaatccgagtgaagagagggatcaatcttgctcagcgagacactctaagcagcgacccttttgttgtcataaccatgggatcacaagaagctgangacccctgtttggggnaatnacctgggagcccccnttttgggnccgggnggantancccctggggttaaaaaacccccn

SEQ ID NO: 17845 - DNA, 332 bp, Arabidopsis thaliana
  unsure at all n locations
  Clone ID: LIB35-053-Q1-E1-H11
tttctgagataaaagtgagagagaaatctaaattcgagaggagaagttttaatttttctgagttagattcaatggaagagatcacggaaggagttaacaacatgaacttggctgttgatacccagaagaaggatcggattcaagtttccaacactaagaaaccattgttcttctacgtcaatctcgccaagaggtacatgcagcagtacactgatgtcgaattgtctgcactaggaatggctattgccactgttgttacggtcgctgagatattgaagaacaatggctttgctgttgaaaagaagatnatgacatccgaccgtggggtatca

SEQ ID NO: 17846 - DNA, 401 bp, Arabidopsis thaliana
  unsure at all n locations
  Clone ID: LIB35-053-Q1-E1-H2
cgcagcatatcttctccgattcctattcgtctctgcaattgaatcttccggtaggcgaagatggcgacgtctgcgaggatttgttgcggaggaggaagtgcatgcgccgttcgttgtggtcgtcgcacgttaaatttgaattctcgatcgtcatgtgttgttccagtgacgaatcgacggaatatgtgtgcgatcgggaagatttcgatgtcgatggaggatttgtcaccaccgtctgcggcggtgaagattgaaaggatcggtggaaggaaacgcggtggatctgttgtgtcgagggagaagctagatgtgtggttgagagattcggtggttgagatcgtgaagaatcttanagagtcgccgttattgatgcatttatacgcggaggctaatggtgggtt

SEQ ID NO: 17847 - DNA, 403 bp, Arabidopsis thaliana
  unsure at all n locations
  Clone ID: LIB35-053-Q1-E1-H5
tgtatgttgacaaattgaatagtctctgatgatttcgatcaaagagaagccacggggggaacgctagcacttaaaggacgaaagctgtgttagtattctctccactgtaaaggacaagatgtcccagaagcgaaatcttccttcttggatgagttctagggatcccgagattactccgagtaagtctcattgtaagaagcctaaggatgaaggaccaaccgaagagtacaacaagtagaaatgccccttccaacaagtcaagaacacgccgagccaagttcaantaccactgaattctctaaacttatggaaagcgttggtttttgtactttcnggctttgntaatcctgagaggagtacactgaggtcacaagccttgacaatggggagcaactatcaacct

SEQ ID NO: 17848 - DNA, 113 bp, Arabidopsis thaliana
  Clone ID: LIB35-053-Q1-E1-H9
tgtagaaacaataataagtttcaaacaagtcaagatgtagtttcatggactacctgaaatatcttttattaagctaacttagtaatctgtgaataaaaagcaaaaggggttga

SEQ ID NO: 17849 - DNA, 303 bp, Arabidopsis thaliana
  Clone ID: LIB35-054-Q1-E1-A8
caagtcacacaacagatattcacttttgctctgaaattagctggagaaggaaatcctgttttagccaaggaagctacagcaattgctatctggtctgtgacccaaaactttgattgctgcaagcactgggacaatctctacaaggagaatctggaagctagtgtcgctgttcttaaaaagcttgttgaagaatggaaagagcattcggtcaaactatcatcatcaccgaatgatgctctcactctcaaccgaactatgaaaagcttcaggctaaagaacgaggaggtcatcactgagggagga

SEQ ID NO: 17850 - DNA, 291 bp, Arabidopsis thaliana
  Clone ID: LIB35-054-Q1-E1-B6
actatgggaagtgtacagttgagtggttccggcctagtagcttctctacctccaaatcatagctttagccacaagaccaaacttaataagccaaattcgtacttctttcgttcaaaacacaatgccgcaagaaccaaaactgtccgagccataagcaccgcaccagcgagccagcctccagccgctgatgagcccgacgaacctcctgctgtcgattttgcgttcgtccattcggtgttgttgccggacgggacaccggacgtacattggagaagagcgaacggtggacag

SEQ ID NO: 17851 - DNA, 292 bp, Arabidopsis thaliana
  Clone ID: LIB35-054-Q1-E1-B7
cttatcaaaaactcgctctccatccaacaaaacccgaagaaagagagattcagactcaaatctctcagtaggaatggcaagtgaaacagagaacatcaagtatgaagagagtttcatcaagaacactcgaggaatgaaactgttcacgtgcaaatgggtaccagcaaagcaagagccaaaggctttagtctttatttgccatggatatgcaatggaatgtagcatcaccatgaacagtactgcgaggaggctggtgaaagcaggatttgcggtatatggaattgattacgaa

SEQ ID NO: 17852 - DNA, 302 bp, Arabidopsis thaliana
  unsure at all n locations
  Clone ID: LIB35-054-Q1-E1-B8
tcctancggtgtttatgctcagcctccttctcaggcatggcaaagcgtttggcagaattcagctggtggtggtgatgatgtgtcttatggaagtggaggaagtagcggccatggtaatctcgatagccaaggttgagctatggaaccagaagcttanagatttaatcatcatttcgaccctgcaagtgtctgattcttatatgtctatgattcgaatgacttactcgaganagagagagagagatcaaacannacaaaacaaaaaagctctttttcatttttcctgttaacttataagttat

SEQ ID NO: 17853 - DNA, 289 bp, Arabidopsis thaliana
  Clone ID: LIB35-054-Q1-E1-C3
ggtcgcagtgaccaggcccgggcgactgtttaccaaaaacacaggtctccgcaaagtcgtaagaccatgtatgggggctgacgcctgcccagtgccggaaggttaaggaagttggcgacctgatgacaggggagccggcgaccgaagccccggtgaacggcggccgtaactataacggtcctaaggtaagcgaaattccttgtcgggtaagttccgacccgcacgaaaggcgtaacgatttgggcactgtctcggagaaaaggctcggtgaaatagacatgtctgtgaa

SEQ ID NO: 17854 - DNA, 293 bp, Arabidopsis thaliana
  unsure at all n locations
  Clone ID: LIB35-054-Q1-E1-C5
ggtgtcaattccaaaactaaaacccaaaacaaaaagaaaaggaagaagcaaaaacctcttagaagttctctaatttaaaaaatttattcatttttcttggggaggtttgagtttttgttcggtggtgatgttaggtagggaaccaaaagaaaatgggagaagtaaagagtcgttagacacacagcaatagcgagcgaacgtacgttcatatgctggccttgtgtgtagtttgtgttgttattagtgtgagaagcatgaatcantatgatgaatttatgattaanaaaaaaaaa

SEQ ID NO: 17855 - DNA, 374 bp, Arabidopsis thaliana
  unsure at all n locations
  Clone ID: LIB35-053-Q1-E1-A12
aatcatcaaagctcttggcgaagctcaagatgatattctccagtttgatgccccagttctcattaacagggatagattttcatggttacgagacgacgagtttgctcgccagacacttgccggccttaatccttatagcattcagctagttgaagagtggccgttaataagcaaactagacccggccgtttatggtgatcccacctcactcattacttgggaaattgtggaaagagaagttaaaggaaacatgacagttgatgaggctctaaagaataagagattgttcgtgttggattatcatgatttgcttctaccatatgtgaacaaagtgagagagttaaacaataccacattatatgcttcctanaaaa

SEQ ID NO: 17856 - DNA, 401 bp, Arabidopsis thaliana
  Clone ID: LIB35-053-Q1-E1-A7
cgagaaaatccagatcgggaatcaacttagagaagaagaaaattaaaaaagagaacttctaaagatgaatttggggttcttagttggagttttcggcgttcttattctttctcatgccgcttattcaacaatccaatatagaggattgttgaagattatggaggaagagttttctcgaccaccgattaatgttattctggagttgatcattggactagctctgtgtatgtgggttgctttgactttccctggtaaatttctctcgatccatccggattctgatgaaaacagggcggtgtttttaccaagataattcggatttcatgatattcaatcaccgtggcagactgttcccaccgcagatcgacatgaagttttgaatttttatcacactgcttagt

SEQ ID NO: 17857 - DNA, 399 bp, Arabidopsis thaliana
  unsure at all n locations
  Clone ID: LIB35-053-Q1-E1-A8
aggatcaggtttactaagggtgctttttactacaaaagcaacaatgtagtgacaggtaaaagagtgttttccataaaagcacaaatcacaacagaaacagatactcctactcctgcaaagaaagtagagaaagtgtcaaagaagaacgaggaaggtgtgattgttaacaggtacagaccaaaagagccttacactggaaaatgccttctcaacaccaaaatcacagctgatgatgctcctggagagacctggcacatggttttcaaccatcaagggagaaatcccgtacaagagaaagacaatccgttggtgtgattgcagatggaatttgacaagaatggaaagcctcacaaaggccagaccttactccaatgcaancaaccgctccttggagatntc

SEQ ID NO: 17858 - DNA, 384 bp, Arabidopsis thaliana
  unsure at all n locations
  Clone ID: LIB35-053-Q1-E1-B10
ttgaagctcttacacaagagattaagaagaagcttacacgggctgttgtctctccagcacaaacacgcaacttgttacaagacttatttgctgatatagctctcgaagtagacgatcgagccaaagatgtgatccttagcaaagaagaggatttgattacttctgatgaagcagatgctgatggtccgttatgctttttcgatgtccttgctgattactatgtgaaagtgtctgagagggggaaggatatacttgatttgatggtgcagctgtggagccagtcctttgcatcacatatattctctctactgttccataaatggctgtttggggttgagctcgacaatcaagaaatactcctgcgatattcttcggntccggggc

SEQ ID NO: 17859 - DNA, 400 bp, Arabidopsis thaliana
  unsure at all n locations
  Clone ID: LIB35-053-Q1-E1-A10
gggcctcagaaggaacttgggcaacttggtgtttttgctgagctgcaagcgctcttccctggtctgcgcatttatgtagatttgattggacctgacgttccacaacatatggatggagaaatgatctccctttgcagatattccccttgcatgggaaaagaatgtgaatgtaaaaattcaagcaaaattctcaattccgggagcaaacctgctttggtttcggctgtgtcattacagctccgtagagggttttaccatgatcgttacaatgacataacaaaggattcatttcctccacacatagtgattgctccaaacgcaggcatcgctgcatatccaagctggttgccaactattgaactgataanggagatacaantcccaccaatattctcngggt

SEQ ID NO: 17860 - DNA, 69 bp, Arabidopsis thaliana
  Clone ID: LIB35-053-Q1-E1-B3
ctatgatatcactgtattctatttgaggtttgttacattttatatgaatgatattagtgtagtttgcca

SEQ ID NO: 17861 - DNA, 402 bp, Arabidopsis thaliana
  Clone ID: LIB35-053-Q1-E1-B7
gcgttgtaaaagaaagtgtgattcacgcgctttgcttcttccgtttgccctaaacgactctgctagagaagacgaaggagagagaaaatccctccgattatattccgtacaatccgatcgatttcccggcgccagatctcaccgcgactcgtctactttccgatttggttcgtgttgactcagttacgattaaactatggatccaatggatatagtcggcaaatccaaggaagacgcttctcttccaaaagctacgatgactaaaattataaaggagatgttaccaccagatgttcgtgttgcaagagatgctcaagatcttctcattgaatgttgtgtagagtttataaatcttgtatcttcagaatctaatgatgtttgtaacaaaagaggataaacgga

SEQ ID NO: 17862 - DNA, 399 bp, Arabidopsis thaliana
  unsure at all n locations
  Clone ID: LIB35-053-Q1-E1-C1
aacatttgagtacacagcaattatttgcagatcccacagtgcctccataacagagtacggtggtgtangagacggcaagacgctaaacacaaaggccttccagagcgccgttgatcatctcagccaatactcatctgaaggcggagcacagctctttgtacccgccgggaaatggctcaccggaagtttcaacctcacaagccatttcactctgtttcttcacaaagacgcaattcttctcgctgctcaagacttaaacgaatacccaattctaaaggctttgccttcgtacggacgangacgtgacgccgccggtggaagattcgctagtctcatcttcggcactaatctctccgacgtaattatcaccgggaacaacggcacaatcgacggtcaagg

SEQ ID NO: 17863 - DNA, 390 bp, Arabidopsis thaliana
  unsure at all n locations
  Clone ID: LIB35-053-Q1-E1-C10
tcttaacgggaactttgattgggctagcttggcaggtcttaatccaattccagagctagctccgaccaatggattaccgagttacggtggttacgatgcgtttcgagcggcggaaggtggggcggagagtgggcatgtgaatcggcagcagaactcgagcgggttgactcagagtttcgggtacagctcgagtgggtttggtgtttcgggtcaaacattcgagtttaggcaatgagagagatgtgaagttactgatgggtgaaaaaagtaaaaaaaaacttggagatagtagagtggcaattgatgtaaataatagggatttatatggggcttttaccgattccgtgaagcgtnngattccncccaanggggaaaaggnccccccggggg

SEQ ID NO: 17864 - DNA, 404 bp, Arabidopsis thaliana
  unsure at all n locations
  Clone ID: LIB35-053-Q1-E1-C12
cggaaaaaagaagtagaagacgacgacgatggcgggatttgagagctatgtggttgttcacaacatagcaaagcgtcacaacgtcggaactttagctcgtagcgccactgcctttggtgtgacggagctaatcctcgtcggtcgccgtgatttcaacgccttcggtagtcatggttcagcttctcacatccgtttccgccattttcactctctcatcgaagctcgcaactatctcaaggaggagaaagattgcgatatatgcggcgttgagattgcagatggagcttctgcggttaatgaacatcctttcaaaagaaacactgcgtttcttctcggtaatgagggatcaggattatctgcgaangaatacnaaatatgcgacntcttttgtgnaaaatcccccc

SEQ ID NO: 17865 - DNA, 392 bp, Arabidopsis thaliana
  unsure at all n locations
  Clone ID: LIB35-053-Q1-E1-C2
gcaagaagaagagtgatgaggagaaggacgaccgtaacaacaatatgcctcaagactctggaagctcgtcttcagatcaatcaccgacatttctagaaagttccggaagctccaacgatccgcctttacccacagacgccattcagttactgagttcatcattgaacaacctcatattagttcaactcgctagtgaagtttatcaagtcttgtgtggttttcacattgtgttactgtacattggttttggttcacggtggtggttttatctccagacaattggtttaatgttcnttanttaattaatacctcctttggtggttaaatccttttacctttgggtttcctttgatcgttttgggttcccctgactttttggtanaagtttggta

SEQ ID NO: 17866 - DNA, 392 bp, Arabidopsis thaliana
  unsure at all n locations
  Clone ID: LIB35-053-Q1-E1-C6
ttctttgaggctgagaaagaggagaagaaggagatcccacagggaagaaattctaatccatggaatcatctccttcgttccttgacaatcnnnnnnnnnnnnnnnnnnnnnnnnnnnnnnnnnnnnnnnnnnnnnnnnnnnnnnnnnnnnnnnnntggtggtttctagcatggaagcttgtattaagccatgttcctctagtacaagagatctttggcttgaggaagaaaacctttataccaaaacctgaatctcgtggtcgaatcgccaaattctacaaaagtatcagttctcagaatcctgttccccaatgaaatcgcaagctccgaggtttatagaagcttcgatgatccgaaaaccgaacgagtaagaggatattcaatgtcacaatc

SEQ ID NO: 17867 - DNA, 377 bp, Arabidopsis thaliana
  unsure at all n locations
  Clone ID: LIB35-053-Q1-E1-C7
gaaagatgtaaggagagcaactggtggtagtagtgacaagacaatgaatagcaatagcagtaccaacgaagaaagtttagtcaacggtgaagctacaatcagctagtggaatgcaaacaagatcactgttcatatctgtgtctcgtgagactcattacgaaaggaggagagtttcttccaacggaaccacagtttcttgaagctgtgcatatatgttggcaagtctggtgtggaggaggataacatttttgaagacgtcatatgttgggagattctcagacatttcatcagttctttctgttgtcttctctcttgcaaactcattagtccgtttangttacttgatatattaatgtttttgactaaattttatttgg

SEQ ID NO: 17868 - DNA, 355 bp, Arabidopsis thaliana
  unsure at all n locations
  Clone ID: LIB35-053-Q1-E1-D11
tgtggcaaggctacacttgtgtttgcacttgattatcttttcaagacaacaaaaaagaagtcagcgacgatatccgtagacgatttttacttgactgcagaaggccaggctgaattgagaaaaaagaatccaggaaatgcacttctagagtatcgtggaaatgcaggaagtcacgatctgaaactttctgttgaaacactagaagccctgtcgaaactgaccaaagaaggcttaaagatgaaggtacctaggtacaataagtctgcctatagtgggagaggtgacagggccgattcatcaacatggcctgaagttgaaggacctctatcggttattctctttgaggggatngatg

SEQ ID NO: 17869 - DNA, 378 bp, Arabidopsis thaliana
  unsure at all n locations
  Clone ID: LIB35-053-Q1-E1-D7
aaaaanaaaagtaagaacgagagagagaaagccatgtctgcgaaaacaatcctatcatcagtagttttggtggttctcgtcnccgcatcagcagcggctaatancggnttcgatnagtcanacccgatccgantggtctccgatggtctccgggaggtagaagaatcngtttcccagatcttaggtcantctcgtcacgttctctctttcgctcgcttcactcaccgatatggtaannngtatcanaacntggaggagatgaagcttcgattctcgattttcaaggagaatcttgatttgatcagatccaccancanngaaaggcttatcttacaaactcggtgttaatcantttgctgatttgacatgggcnagagt

SEQ ID NO: 17870 - DNA, 392 bp, Arabidopsis thaliana
  Clone ID: LIB35-053-Q1-E1-D8
caacgcggtggttgagccagaggccatgatgatcggaggagaacaaagaacaccaagatctccttacgaatggctcaaatctacggcgcaggagctagagttaagagatcggtgccggcgtgtgaagtcacgtatcaaggttacgtgtcgtaacaacaattgtgcttataataattgtgttcatcatcattatcatagccagagttatcctggagatttcagttacgatccgttgagttacgcgctcaatttcgaggataatgtgagagctgatgacgatggttcttttcctaatttcacggcgaggttgcctcagtcgccggtgaccaagacgagatcggcgacggttgatttgatctctttctgacggaataattaattacaaaaagatt

SEQ ID NO: 17871 - DNA, 376 bp, Arabidopsis thaliana
  unsure at all n locations
  Clone ID: LIB35-053-Q1-E1-D9
ttaagagttggtatagtatactcttacaatgacagggtggttcagatcgcaaggaaaatgtcgagtttcggtcttgtttcgtcacaaacgcagcatttgatcgctaaaatgttatccgatgaagagtttgtagacgagtttatccgcgagagcaaattgcggttagctgcaaggcacgctgagataaccaccggtttagatggtttagggattggttggttaaaggccaaagccggtttgttcttgtggatggatttaagaaatcttttgaagacagcaacgtttgattcggaaaccgaactatggcgtgtgattgttcaccaagtgaagctcaacgtgtctccaagcggttcgttccaatgccangaaaccggga

SEQ ID NO: 17872 - DNA, 361 bp, Arabidopsis thaliana
  unsure at all n locations
  Clone ID: LIB35-053-Q1-E1-E1
aaaagagatggaaagaaaaaagttttcttcaaaatttattcatttgctcattgtgtttttgcttctttgtacgtttctttctcgtaccgaatctgctcttccttatcaccatgaactgttcttggggaggaagcggatgaattattataagcccaacagtgccataggaacaccatcatcaactagtgaccacgctccaggcagtaatgggaggaagttgatgagtatatatagacccaatggagacatatttacaggaccatcaggcagtgggcatggtgggggtcgcactccaaccccctaagtatatatatattaatgtgtaatcaaggactcacaagcgaagcntttaattctcgat

SEQ ID NO: 17873 - DNA, 395 bp, Arabidopsis thaliana
  Clone ID: LIB35-052-Q1-E1-D6
gtgaacttggattgatagatgatagacgatggaagttataccaagagaagcaagcaaggatttcagaagagaagaagagactgaaaactgtcaaggtttcagttgcagtaggtgatttggctgccgaagtttctagtgtgtcttctcagccagtcaaagaatcagcgacactagagagtctcctaaagaaaccacatatccactacaagcttcttgagaagcatggctttggaaatgaaacattatctagaatggagaaagactgtgtagagatcgatataaaatatgaaggtttcattgttcgccagcaaaaccaactgcagcagatggtccaccaacaacatagacgacttccagacgatttggattactattcgatgacaactctatcccat

SEQ ID NO: 17874 - DNA, 406 bp, Arabidopsis thaliana
  unsure at all n locations
  Clone ID: LIB35-052-Q1-E1-E1
gaaagaccatcactttggaagtggagagttctgacaccattgataacgtgaaagccaagatccaagacaaagagggtattcctccggaccagcagagattgatcttcgccggaaaacaacttgaagatggcagaactttggccgactacaacattcagaaggagtccacactccacttggtcttgcgtctgcgtggaggtatgcagatcttcgtgaagactctcaccggaaagaccatcactttggaggtggagagttctgacaccattgataacgtgaaagccaagattcaggataaggaangaatccctccggaccaacaagaagttgatctttgccggaaaacaattggaggatggtcgtactttggcggattacaacatccaagaaaggagtccgacccntc

SEQ ID NO: 17875 - DNA, 248 bp, Arabidopsis thaliana
  unsure at all n locations
  Clone ID: LIB35-052-Q1-E1-E2
aaacacaacatatccacaatacaaaacacaactttcatatataacaaaaaaagttatagaaatggccaaagacgtggaangacctganggatttcagacaagagactacgaagattcgccaccaactccgtttttcgatgcggacgaacttaccaaagtgggtccttatacagagccgtcantgccgaattcgtagccactctcctcctccntgtacatcancgtttttaactgtcatcngttacaaa

SEQ ID NO: 17876 - DNA, 486 bp, Arabidopsis thaliana
  unsure at all n locations
  Clone ID: LIB35-052-Q1-E1-E3
ctgtttacgcctgncccgtaggcgtccgaaaattcccnggtcnacccacgcgtccgcccacgcgtccgcccacgcgtccgtacggctgcgagnnnnnnnnnnnnnnnnnnnnnnnnnnnnnnnnnnnnnnnnnnnnnnnnncttgttgtagcagttgaagcnnnnnnnnnnnnnnnnnnnnnnnnnnnnnnnnnnnnnnnnnnnnnnnnnnnnnnnntggctctgaatagtgtctcctctgaagaatttaccttcccatcgctagcttctcatgattcttctcaccattccggtcttgattcacctcctttgtggagacactcaccggttacttcctttcgccggaaagattacgactttggtttggcaagattagtcattggaaaagacggtgatcatgatcagaggaagagcttctcgtacgtggagatgagaagtcgttggatngacgacaaagaanangagaaaatggatatgttatgggaa

SEQ ID NO: 17877 - DNA, 345 bp, Arabidopsis thaliana
  unsure at all n locations
  Clone ID: LIB35-052-Q1-E1-E4
ctcacaaactcntctttcagtcatcacagaaaacaataaaaacaatggcggataagctcactgacgatcagattacagaatacagggaatctttcaggttattcgacaagaatggtgatggttccattacgaaaaaggagctcggtaccatgatgcgttcaatcggtgaaaaaccgacaaaagctgatcttcaggacttgatgaacgaagcggatttagatggtgatggaaccatcgatttccctgaagttcttgtgcgtaatggctaagaatcaangtcatgatcaagcnccgcgtcacactaaaaaaacaatggcggataagctcactggacgatnagattac

SEQ ID NO: 17878 - DNA, 484 bp, Arabidopsis thaliana
  unsure at all n locations
  Clone ID: LIB35-052-Q1-E1-D5
aactgttccgcctgccggtaanggtccaaaattcccgggtcnacccacgcgtccgcncacgcgtccgcccacgcgtccgtacggctgcgagaagacgacagaaggggaccatcgtcgtcaatggaaacgagaatcctttgacctctcctctcagtcgtctctctctctcgccatctccgccgtcggtctgaggcatcatcttggtcgaagaagaatcagcatcaacttccatcacgctcacgaaattggtcgaagaagaagaatcagcccttcttttggttggtgaagatttggcgaagagcaacggcaagccaaagatgaaaaactcatgaaattcgatgaaatcgaagagaatagaggcaatcttggttcgtgaagcagaagcaagattctactgcacacgttgatatcacangctatcaatgctggtctctgtgtcagagaagagaaattggcctgatgcccacaacaagaaaagcaagga

SEQ ID NO: 17879 - DNA, 393 bp, Arabidopsis thaliana
  unsure at all n locations
  Clone ID: LIB35-052-Q1-E1-E6
ggcagagatttcatcagtttgctttttggctttttacgtgtcttcatagcttattggaatttaaaagattaaaaggaaagaaaaaattctgagagagagatgggaatgagtggnnnnnnnnnnnnnnnnnnnnnnnnnnnnnnnnnnnnnnnnnnnnnnnnnnnnnntcaccataccgaatctactttgccctctgatagtgaacaactctcaataactgggagcagattgatgagtataatatataagccaaacggagacatatataatatcggaagcagagtatatatatcaccttgaagcagtggacatggtggtggtcacattcatcaacattaccttccttangttttgggccagtatacaaagttgtgtaataattcaccaagcata

SEQ ID NO: 17880 - DNA, 388 bp, Arabidopsis thaliana
  Clone ID: LIB35-052-Q1-E1-F12
cagaatctgagatcggacctttagagagagagagaaagatgcagagggacgtgtcgagctgcaacacttacaactatggagacgctctctattgggacgctcgttacgtgcaagacgcgctttctttcgactggtaccaatgttactcttctctccgcccttttgtccgcagcttcgtctctacttcttcacgagtcctcatggttggctgtggcaactccctgatgtcagaggatatggtgaaggatgggtatgaggacatcatgaatgttgatatctcttcagtggctattgagatgatgcaaaccaaatatgcatctgttcctcagctcaaatatatgcaaatggatgttagagatatgaagttactttgaagacgaatccttgt

SEQ ID NO: 17881 - DNA, 385 bp, Arabidopsis thaliana
  Clone ID: LIB35-052-Q1-E1-F3
cactccatcatgcggcgaacgggattaccggcgcgtgatcttaggattctcgatccactgttgtcgtatccatttactgttttaggtagagagagagcgattgtcatcaatttggagcatatcaaggcaatcatcactgctcaagaagttttgttgcttaattccaaggatccttcggtctcaccctttattgatgagttgcagaggcggattctctgtcaccatcacgccactaaacctcaggaggagcagaactctgggggagagcctcatacgagggtagatcctgcccaaggagaagctggaacggaacaatcttctggggatcaagggagtgaagccaagaaggatgcgaagcaaagtcttgagaatcaagatggattga

SEQ ID NO: 17882 - DNA, 394 bp, Arabidopsis thaliana
  unsure at all n locations
  Clone ID: LIB35-052-Q1-E1-F8
gtccgnnnnnnnnnnnnnnnnnnnnnnnnnnnnnnnnnnnnnnnnnnnnnnnnnnnnnnnnnnnnaggcacggcggcggaaggtataacggagagactctcttctctcgacaatctctattttccacgcgccgtccaattaaccgctgcatcttccgaccaacgcaaatccatcctcctcgacctcctccgtcgtgatcccgccgtttttctagagagatatggatcggagctactagtagatgaattgcttgagtttgatgctatgaaacatgactacgangttgattggcatttgaaaaacctgcggaagaagataagtccgacttcagaagagattaaatcgangtctgtagctgtgangaataggagattggcttaattgaataagcntg

SEQ ID NO: 17883 - DNA, 400 bp, Arabidopsis thaliana
  unsure at all n locations
  Clone ID: LIB35-052-Q1-E1-G4
agagctctgacngcatcagccacctctgcggcttcncaaatccaaataagctgtggatgaaacgaagaatcctagatttctgaatggcgacaccatttatagcgggggttgcantanctgcaacagcacttgctggtagatatggaatccaagcatggcaagcattcaaggcaaggccaccaangcccaaaattaagaaattttatgagggcggtttccagcctacgatgacgaaaagggaagctgctctcattcttggcgtcagggagagtgtancggcggaaaangtgaangaagcacacangaangtaatggtagcaaaccatccagatgcaggtggtaaccatttcctaacctcctaagatnaatgaagctaaagacntatgctaagcaaaactaa

SEQ ID NO: 17884 - DNA, 396 bp, Arabidopsis thaliana
  Clone ID: LIB35-052-Q1-E1-G5
atctagaacaaagggctggaatgacttcccacatggacgttggggtgattcacacagtgcagcatacagtacactttcggattatcagtttgcgcgcccaaaagaacgtgacaagaagcttcagcaagaatgggtcgtcccactgaaaagcattgaagatgttcaagagaaattcaaagagctctgcattggaaacttaaaaagcagcccatggtctgaattagatggactccagccagagacaaagatcataaatgagcaactcggaaaaatcaactccaacggtttcctgaccattaatagccaaccatcagtcaatgctgccaaatccgattctccagctattggatggggtggtcctggtggttacgtctaacaagaaagcttatctggagt

SEQ ID NO: 17885 - DNA, 195 bp, Arabidopsis thaliana
  unsure at all n locations
  Clone ID: LIB35-052-Q1-E1-G9
acggcccaaaattcccgngtcnacccacgcgtccgaattcgagcggccgcnnnnnnnnnnnnnnnnnnnnnnnnnnnnnnnnnnnnnnnnnnnnnnnnnnnnnnnnaaacacactccttttattaatcataaagttcataaaattaaacaagaagacttttcattaaaagtctcctatatttttggtaagatact

SEQ ID NO: 17886 - DNA, 55 bp, Arabidopsis thaliana
  unsure at all n locations
  Clone ID: LIB35-052-Q1-E1-H10
acccccctgtntcngngcaataaacncngcgggggttttgggggtcaccccccan

SEQ ID NO: 17887 - DNA, 373 bp, Arabidopsis thaliana
  unsure at all n locations
  Clone ID: LIB35-052-Q1-E1-H12
agctgtggaagaaaggccaaaccccatgtttcattgcttgtactacactcgtcgaagggttgaggaaatcaggaagaacagagaaagcgtcagggtttatggagaagatgatgaatgcaggaattcttcccgatagtgtgacatttaacttgcttcttcgggatctctgcagttctgatcattctactgatgcaaacagattgagacttttggtatcaagcaaaggatatgaacccgatgagacaacgtaccatgttttggtttcggggttcacgaaagaagggagaagaaaggaaggagaagttctagtgaacgagatgttggataaagatatgttgcctgatatccttacatataataaaatgttggntgg

SEQ ID NO: 17888 - DNA, 236 bp, Arabidopsis thaliana
  unsure at all n locations
  Clone ID: LIB35-052-Q1-E1-H3
gcacactcgcacatgggaacaaaagaatctgtcttcttctctgttctattatttatacttacttggtaaaatatctttcttgtgcagaacagaagaaaaagaaacacccatggctctgttttctagcgtctcagtttccgcgtttctcttgatcgttgtatcggttcaatggactctgggtttgcagtgaatccacaatcttaacttctcctgctgttttancgtatatcaaatgc

SEQ ID NO: 17889 - DNA, 472 bp, Arabidopsis thaliana
  unsure at all n locations
  Clone ID: LIB35-052-Q1-E1-H4
tanctgttcccgcctgccggcaaaaagttcnagggtccaccaacccgtcntaacggcngcaaangacacagaagggacagncccanaattncaattgatggnanaattancgacaaattnganggtnctngtnatttcancacaaaagggtcacgctctgatgttcccaaagggtggttgggagcttgatgaatctgtagaagaagctgcgtcaagagaatctctagaagaagctggagttgttggaaacgttgagagacaacttggaaaatgggatttcttaagcaaaagcaaaggaacattctatgaaggattcatgttcccaatgcttgtgaaagaagagcttgagctttgacctgaacaacatcttcgtcaaagaatttggatgaaagttgatgaagcaagagacgcttgtanagattggtgggatgaangaagccgttagatgttttggtccaaaggctttccntta

SEQ ID NO: 17890 - DNA, 420 bp, Arabidopsis thaliana
  Clone ID: LIB35-048-Q1-E1-E3
aatggaaggagttcatagctggacttcacaagcagaagactgagcttttcatggttcttatcgagaaaaagctgcttccgcttcgacccggtgttgcaaagttggttgatcaagctttaacaaacggagtcaaagtagctgtgtgcagtacttcaaatgagaaggcggtttctgctatagtttcatgcttgcttggaccaagaacgagcagagaaaatcaagatattcgcaggagacgtagtccccaaaagctgcgggaatgacttgtatagttacaaagagtggatacacggctgatgaagatttcgagaacgcagatgcggttttcgactgcattggagaccctccagaagagagatttgatttggcattctgtggaagtcttctccggaaacagttcgttaagttaaaaactacaaa

SEQ ID NO: 17891 - DNA, 257 bp, Arabidopsis thaliana
  Clone ID: LIB35-048-Q1-E1-E4
atcagagaattggtaagtagtaagaaccctagctttagattcgtcagattctgattactcgaatcaaagcagggtttttgacactgaaaatccgatctcgtgaagtgtgttttgcatcgaatcggaaaatatgaaagaagggaaatcatcgaaagtcgtcgagtcaacaagagcagcatgaacagatttatcatcaaaacagtcacttgggttctttcaacttcgccaaattgtttgattctgaaagcttcctggga

SEQ ID NO: 17892 - DNA, 371 bp, Arabidopsis thaliana
  unsure at all n locations
  Clone ID: LIB35-048-Q1-E1-F4
cngctaagaanacgacagaangggtacggctgcgagaaagacgacagaanggtactgctgcgagaanacgacanaacgggtancgctgcgataagacnacataangggcangaacaaangtcaangttccaactttccttgtcccggctactcataacgtgtggatggatgtgtatgctctcccggtacctgnagcaggtggaaanacatgtgcgcagatctttgaagaagctggctgtgacacaccagccagccctatctgtggtgcttgccttggtggcncaacatacacctacgctcgcttgaatgaacctcaagtctgtgtctcaaccgaccnacacgaacntccccggtcccgattggacacaaan

SEQ ID NO: 17893 - DNA, 404 bp, Arabidopsis thaliana
  Clone ID: LIB35-048-Q1-E1-E10
acagagagagaagagaagaggaagaaaatgggatctataacggtagctccgggaaccaccgtcttattctccagtcggcggctagatctttgcggtcgtcgccatgagaatctatccgtcgtttcgtcctcacaaccgtctctgatgccaaagcagagatggctttatattcccgagacgaggttgaaaagagaggttttaaagctcgatgtcgtcggaagagctgctgattccacgagctcttctccatcagtagcttccggtgatagaaccttaattcctgatgatgaattcactttagccaagatttcatttggtgttattgggctaggtctcggggtttcgctactctcgtatggttttggggcctattttactatccttcctggaactgagtggtctgc

SEQ ID NO: 17894 - DNA, 404 bp, Arabidopsis thaliana
  unsure at all n locations
  Clone ID: LIB35-048-Q1-E1-F6
cgttccttggttgttcgagctacctcgaagaagagtaacgacgattcttcttctcctggagatgcttctcaggaaaacaaaccttctaacggcaacaagtccggcgattccgcggctccgaaatcgttcggtttaaacacggattggagagagttcagagcgaacttgtttatgaaagagcaggaagaaaaggcggaagctgagggtcatgaatcggaacctataggtttgaaatgggcacatccgattccgtttcctgagactggttgtgttctaagttgctacagagaagctagatggttatagaacatttgcgagaactgttgtgcttcttcttaagagcaggtactagacacccacaagaanggccgtttggtgttgttaacaaccgttcacttcatana

SEQ ID NO: 17895 - DNA, 322 bp, Arabidopsis thaliana
  unsure at all n locations
  Clone ID: LIB35-048-Q1-E1-F7
tggttggaggttttgggctgtggggtgaccgagcaagtaattctgaaacaaagtggattagaaaataatgttgcttgggccttcggacttggacttgagagacttgctatggttttgtttgacatacctgatatacgatttttctggtcatccgatgaacgattcacgtcccagtttggaaaagganaacttggagtgaaattcaagccatattcaaagtatcctccttgttacaaggacatcagtttctggataagtgatttgttcacagagaataatttttgtgaanttgttagaggaattgctggggatcttgttcaan

SEQ ID NO: 17896 - DNA, 426 bp, Arabidopsis thaliana
  unsure at all n locations
  Clone ID: LIB35-048-Q1-E1-F9
gaggaacaggtgtttgacctcacggaagtgaagccgcatgagtttgttcgatacgggttggggtgtttggagaaagtggcagcggaaggagatgaatgtgcaaaagaatgcagagcaaggttgaggattatggttgcaggaggtgatggtactgttggttgggttcttggatgtcttggagagcttaataaagatggaaagtcgcaaattcctcctgttggagttattcctctcggtacagggaatgatctttcaaggagttttggttggggtggttcgtttccttttgcgtggagatctgctgttaaaagaacactccatcgcgcaagtatgggtccaagttgctanacttgacagctggaagattttaagtgtcaatgccatctggaagaagtcgtanattctccttaatccttaaaanccgcc

SEQ ID NO: 17897 - DNA, 412 bp, Arabidopsis thaliana
  unsure at all n locations
  Clone ID: LIB35-048-Q1-E1-G10
gaaactcaatccttgtatattcaacggagagagatctgcgagagaaagagagatcagattccggtgttccaaggaagcacatattttaagatccaagaatcgcctgagagatgtctaccttcagtggcgatgagaccgctcctttcttcggcttccttggcgctgccgctgcgctcgtcttctcatgtatgggagctgcgtacgggacagcaaagagtggtgtgggagtggcatctatgggtgtgatgaggccggagttggtgatgaagtctattgtcccagttgttatggctggtgtgttgggtatctaaggtttgattattgctgttatcatcaagtaccgggattaaacccaaaggtaaatcccactaactccttcgaacggtaatgctcaaccccccttcnggccttg

SEQ ID NO: 17898 - DNA, 287 bp, Arabidopsis thaliana
  unsure at all n locations
  Clone ID: LIB35-048-Q1-E1-G11
gaagaaaatggatgaggagccatccaaggagactagaaatgatagtgccggagaagaggttttgaagaactgtcatgttgaagaagataaggaaaaagaagctcaagaaggttgcagtgaaagaagtgataaagaatatgagagggttggtggtggggctaagagggtagagcaggtggagattgagttaaggaagaaaagcgccgtangagaagatgacctgaactgtactgttagagaagatggagagacagaaaacttacaagaaattgaagaagagtgtcacg

SEQ ID NO: 17899 - DNA, 404 bp, Arabidopsis thaliana
  Clone ID: LIB35-048-Q1-E1-G2
tgaaagatcaatttttggcaattagtggtgaagatttgaatcagagatgggtttttcttctttcatttctcagcctttgtcttcatctctctcggtgatgaaacgcaacgtttctgctaaaagatcggaactttgtcttgattcttcaaagattagattagatcatcgttggagcttcattggaggatcaagaatctctgttcagtccaattcttacaccgtagttcacaagaaattctccggtgtacgagcttcataatctcttatatgttcatgttgtagggttaactactactcagattgcaagcagtgtatttgcggttggaactaccgcggttttacccttctatactctaatggttgtagcaccaaaagctgaaattaccaagaagtgtatggagagt

SEQ ID NO: 17900 - DNA, 417 bp, Arabidopsis thaliana
  unsure at all n locations
  Clone ID: LIB35-048-Q1-E1-G8
acaccgaagaaaacacacaagactccattattctcctgcttcttcgtcacttcaattattttctctgagactagctttgattcaaccatggctaatgcagcatcaggaatggcagtccatgatgactgcaagctgaaatttatggaattgaagacgaaaaggacacaccgtttcatcatttacaagattgaggagctgcanaaacaagtgattgttganaaaatcggtgaaccgggtcaaacccatgaggaccttgctgcaagtcttccagctgatgaatgccgctatgccattttcgattttgattttgtcagttctgagggtgtcccaaggagcangatttttttcgtggcatggtctccggacacagcaangagtgagaaagcaagatgatctatgcgagctccaaaggacagg

SEQ ID NO: 17901 - DNA, 420 bp, Arabidopsis thaliana
  Clone ID: LIB35-048-Q1-E1-H11
agaaaaagaagagcagagcaaaatccctaaaattttaaactctgttttgctttccgacaatcaaaccctaggggttgctaaagggaaaggagagagatgggtggtgaagaggaagttgtttctgttgagctaccagcaccttcttcatggaagaaattgttttaccccaacaaagtgggttcagtgaagaaaacagaggttgtgtttgtggctccaacgggtgaggagattagtaatagaaagcagctggagcagtatctcaaatcgcaccctggaaaccccgcgatcgcagagtttgattggacgactagtgggacacctaggagatctgcaagaatcagtgagaagactaaggctacgccgtcaccaagataaagagtcacccaagaagcgaggtagaaccaaatctccagtgtcaaa

SEQ ID NO: 17902 - DNA, 411 bp, Arabidopsis thaliana
  unsure at all n locations
  Clone ID: LIB35-048-Q1-E1-H3
gaagaactctctgtnnnnnnnnnnnnnnnnnnnnnnnnnnnnnnnatctcagatttcgtcaacggaagctgttttccttggagctctagctccaggcgttaatggtccaacatggaacacattgagattcgcgtttctgctactgggtctatgtctagctttcatgctctctgtagctttcaccagtggccaatcaatgttgcttgttcatgttggctttctcattgttancgcatctactctctttatcctcctcaattggtttcttgctcagacaggcttagtacaagtggaaacacaaaatgcaggagctgaatttgttaccgaatgataaaaacaaaatgaatatggtcacaccggtaagaangcaacgccttgtgtaacaggaacaacagttaacaaccagattnt

SEQ ID NO: 17903 - DNA, 415 bp, Arabidopsis thaliana
  unsure at all n locations
  Clone ID: LIB35-048-Q1-E1-H6
cagancaagaaaactaacatttannattgttgttcagctcgctcttgatctcgctagagggttgagttaccttcattcgcagaagattgttcaccgagatgtaangacagacaanatgttgttagacaaaacccggnttgttaaaatcgcatgattttggagttgcgagagttgaagcatctaaccctaatgacatgacaggagagactggcacacttggctacatggcgcctgacgttctcaatggaaacccgtataatcgaaaatgcgatgtntacagtttcgggatctgcttatgggacgatatattgctgtgacatgccataccctgaccttactttctctgangtcacttcagccgtcgtccgccataacctganacccgatataccgacgtgttgcccgagcgcacttg

SEQ ID NO: 17904 - DNA, 132 bp, Arabidopsis thaliana
  unsure at all n locations
  Clone ID: LIB35-048-Q1-E1-H9
ggctgcganaagaccacagaagggtacggctgccanaagacnacagaagggtacngcttgcnagaagacnacanaatggtacggctgccaagaaagacnacanaanggttacggnctgcaacaagaccacac

SEQ ID NO: 17905 - DNA, 393 bp, Arabidopsis thaliana
  unsure at all n locations
  Clone ID: LIB35-049-Q1-E1-A10
tgtaaagcagtggacagagacgacgatgagtacgatgaagccaagccggagcgacgaaatatccgacccggaacagcagatcaagaacgcgaaccagatcagagctgatttcgattccttggctcccaaacgacccactaaacccactcgaagcgaaccgggatttcctggatctttctctgcttccgacaaaatcaccgaccatcctgaagctgacaaattccaatctctccagtcacaanctcatggtaaaagttctaangtgagggagattcatctgcaagttcaaagatgagttcctggaaacagagtattactcaaatctcaacgccattgataaagcaacntcacaacgaaccgggaanttgggttttataaatgtgggtgaaaggg

SEQ ID NO: 17906 - DNA, 381 bp, Arabidopsis thaliana
  unsure at all n locations
  Clone ID: LIB35-049-Q1-E1-A12
aacacataacccactcnnnnnnnnnnnnnnnnnnnnnnnnnnnnnnnnnnnnnnnnnnnnnnnnnnnnnnnnnnnnnnnnnnnnnnnnnnnnctaacaagtttccggagaggcaaccgatcggaacttcggctcagagtgacaaggactacaaagagccaccacctgcgccgttgttcgagcccggcgagctagcttcatggtccttctggagaactgggattgctgaagtttataactaacgtttttgttcctgtacatcactgttttgactgttatgggtgtnaagaagtcacccgaacatgtgtgcttccgtcgggnatccaanggtatncccntgggctttccgtgggaanattttcgctcccctcttaaaggggcn

SEQ ID NO: 17907 - DNA, 388 bp, Arabidopsis thaliana
  unsure at all n locations
  Clone ID: LIB35-049-Q1-E1-A3
agcagaagtaacggcaaccaaaaatgacgacaatggcgacacaaggcgcttggctacgaatgacctcatcagccaagtccatgaccaagtcaaccgtgacttcaaaggagcttggattcctcacctcccagctcagcggcttaagaatctcatatactcccagtgacgtcatcaaccgtatctcccttccttcgttccccgggattcagccaatcgtcgcacgtagaatctgcccttttactgggaanaaagcaaacagancanacaaagtttcattctctaaccacaagaccanagaaagttgcaatttcgtcaacttacnatacaaganagtttggtngggaagctggcaaaacgtttttgtccaaacctccgttttatcaancta

SEQ ID NO: 17908 - DNA, 410 bp, Arabidopsis thaliana
  Clone ID: LIB35-047-Q1-E1-G5
ttcatctaaaaactcctcctttcatttccaaacaaaaacttctttttattctcacatcttaaagatctctctcatggcgatgtctttctcaggagctgttctcactggtatggcttcttctttccacagcggagccaagcagagcagcttcggcgctgtcagagtcggccagaaaactcagttcgtcgtcgtttctcaacgcaagaagtcgttgatctacaccgctaaaggtgacggcaacatcctcgatgacctcaacgaggccacaaagaaagcttcagatttcgtgacggataaaacaaaagaggcattagcagatggtgagaaagcgaaagactacgttgttgaaaaaaacagtgaaaccgcaagatacattgggtaaagaagctgagaaagctgcggcgtatgtg

SEQ ID NO: 17909 - DNA, 115 bp, Arabidopsis thaliana
  Clone ID: LIB35-047-Q1-E1-G8
ttggtgagagcatgcttatgttcacccccacacatgagctcagtttcttcttgtaatagattattgacatggtaattgtatgtaccacaataaatacatctatataatatttcga

SEQ ID NO: 17910 - DNA, 419 bp, Arabidopsis thaliana
  unsure at all n locations
  Clone ID: LIB35-047-Q1-E1-H3
gccaaaagaaaaatggatatgtcgcttgcgttatcgacggcaccaatgagtaggacgattatctctgccacgaggcggtcccaaggttcacaacctaaagctaagaaagtcaagccggcgaataagcggccaacgatgtcgacaagcggtttctccggcggaacgacaaaggagttgacttggaagtgcgtagaaggttgtggagcttgctgtaagattgcaaaggacttttcctttgcaacacctgacgaaatcttcgacaaccctgatgatgttgaagctgtatcgaagcatgatcggagatgatggatggtgtctaaactacgacaaagctacacgcaaatgctctatttatgctgatcgtccatatttttgtcgggttgaaccagangttttcaagtcactctacgggattgaag

SEQ ID NO: 17911 - DNA, 411 bp, Arabidopsis thaliana
  unsure at all n locations
  Clone ID: LIB35-047-Q1-E1-G4
gacgcggggaaagctttttggnaaaatgggaggtggaggaagccaagatcttgctcggctttcctcctaattctcgtccccgatccttctcaggttaaagctgcttacaggaagaaagtatgggaatcacatcctgacttatttcctgatgatcagaagcttgttgccgagtctaagttcaaatcgatatctgaagcttattcttgcctagagtctgatttgactcctttggagctattgttgttggaattggaagaatgagaataaaatctagctcatttggggttacaagtctgcagaatcaggacacgtttactctgttttatatacttcgatacattccataaccattatctctagtacaatatcaagctttgtaatttccaacattggtctctgtttgcangtgat

SEQ ID NO: 17912 - DNA, 92 bp, Arabidopsis thaliana
  unsure at all n locations
  Clone ID: LIB35-047-Q1-E1-H4
ggctgccataanacnacagaacgctacngctgcnaaaatacnacagaanggtacngctgcgaaaaagacnacagaaaggtaccgctgccana

SEQ ID NO: 17913 - DNA, 422 bp, Arabidopsis thaliana
  unsure at all n locations
  Clone ID: LIB35-048-Q1-E1-A1
acaaaaggtatagtatataccataaatctccgagattcttttgatgtatctgtccatttcattattacacaaactaggaaactgatatctctctattcacattcctctgattctatttctctttatatatattcacccattaaccatctcaatcttataaccctcaaaatcacaatcttctcttacaaaaaactttgaaagatgaagattcttnnnnnnnnnnnnnnnnnnnnnnnnnnnnnnnnnnnnnnnnnnnnnnnnnnnnnnnnnnnnnnnnnnnnnnnnnnnnnnnntttcttctacttcgtccaacaatgggcaggatnatactggtgacacacaagaagaagtgttgttatccaagttcaaggnaaaccaacttctgaattttggnaattcatgggccttgggcctaantaaaa

SEQ ID NO: 17914 - DNA, 414 bp, Arabidopsis thaliana
  unsure at all n locations
  Clone ID: LIB35-048-Q1-E1-A10
cnanaagaatactctgaaatatcttgaanctgcgacaggaaaaatggacgcggcgatagggaaggttttcgattccgtctcagacttcttctccggcgctgcttctgcttccgccgatgagtttcccttgtgcgattccgacatcatctccggatgtgagaaanaacttgcagaggctcaagacgaangacgtaanaaggaatgcattatgcntctttcatgggctcttgttcattcaaagatgccttcggatattcaacgtgggattgcaatgcttgaagctttggtggntaatgatacaantgcaatgaaacttanggagaagctatatctccttgctcttggttactatcgaagccggtgacttttcangaaaccgggattgtatanaacggtgtttggangttgaaccgg

SEQ ID NO: 17915 - DNA, 417 bp, Arabidopsis thaliana
  unsure at all n locations
  Clone ID: LIB35-048-Q1-E1-A2
agaagcatgaccgtagggaagttcgtcaccctcatttgtctgagagagactaccagacgtatgatcatcttacttctagacgggaaatcttggttcgaaactcgcctgacccaccagattcagcggttactctggattcctacaggagagatccgtattacatttgtgagcgccatgctcttgaaagaccaccaaggacatacatggtttctccaggtagacaagatgatgacctgtattcccggtatgtaacaccggattcattggctgagtactaccgatcatcacaaagatacccaagcgtaactgaacctgagcttccgccttcgttagtaacatcccgggtatgcttaatccccggtcccnttgccttaantctcaanggctgaaaatcangaatgtgttaattcnccctaa

SEQ ID NO: 17916 - DNA, 502 bp, Arabidopsis thaliana
  unsure at all n locations
  Clone ID: LIB35-048-Q1-E1-A5
ntggttcgcctggccgtcccggtccgnaannaantcncgggcngncccacgcgtccgcccacgcgtccgtacggctgcgagaagacgacagaagggggtcggagattaccaacaagagctctctccaatcgtcgtctctttgatatatggcgtctcagcctgcaggtggcagtcctcctaaaccttgggaaaaagaaggaaatacatctggtcctaatcctttcaggcctccttctaatactagcacggctggttcagttgaggcttctggcacagctaatcctggtgaagtagttcctccgcccgtgaacaggcctaatacagctgctaatatgaattcactcagtaggcctgtaccggctagaccttgggaacagcagaattatgggagcactatggggggaggttatggttcaaatctangtatgactctgggtatgggtcaaggtacatatggttcagcattangtgggtatggttcatcatatgggtggtgggatgt

SEQ ID NO: 17917 - DNA, 431 bp, Arabidopsis thaliana
  Clone ID: LIB35-048-Q1-E1-B11
acagagagagaagagaagaggaagaaaatgggatctataacggtagctccgggaaccaccgtcttattctccagtcggcggctagatctttgcggtcgtcgccatgagaatctatccgtcgtttcgtcctcacaaccgtctctgatgccaaagcagagatggctttatattcccgagacgaggttgaaaagagaggttttaaagctcgatgtcgtcggaagagctgctgattccacgagctcttctccatcagtagtttccggtgatagaaccttaattcctgatgatgaattcactttagccaagatttcatttggtgttattgggctaggtctcggggtttcgctactctcgtatggttttggggcctattttactatccttcctggaactgaagtggtcctgctataaatgctaacatatggattttc

SEQ ID NO: 17918 - DNA, 416 bp, Arabidopsis thaliana
  unsure at all n locations
  Clone ID: LIB35-048-Q1-E1-B2
gtgttcaaccattggggctattataatgactcctcttcttactaagcttcttgctggtcagcttgttcccgttgacgctgctggacttgctcttagtacgttccaagtagtgttggttcctaccataattggagttctggcaaatgagttctttcctaaatttacgtctaagatcataacagtgacgcctctaatcggagtcattctgactactctgctctgtgccagccctattggacaagttgcagatgttttgaaaacccaaggagctcaacttatactcccggtggcactccttcatgctgcagcctttgctattggctattgggatttcaaaagttttctttcggcgagtccacttcgcgtancatttctatagaatggtggaatgcaaagttcagcgntcgggtttcttg

SEQ ID NO: 17919 - DNA, 421 bp, Arabidopsis thaliana
  unsure at all n locations
  Clone ID: LIB35-048-Q1-E1-B3
aaaatggacaaaagattatggagtcttcaaggtatgactgctcttgtgaccggtgcagccagcggaatcggttatgccatagtagaagagttagctggttttggagctaaaatccacatatgtgacatatccaaaactttgctcaatcaaagtttaagcgaatgggaaaataaagggtttcaagtgagtggttcagtatgtgatgtaacctctcatcctgagagagaaaaactgatgcaaaccgtctcctcgattttcgatggcaaactcaacattcttgtaaataacgtgggggtacttcgcggaaagccaacaacaagaatatgtggcaagacgatttcacttttcatatatcaactaacttggaagctgcttancatttttgtcaactttcacatcctctcntaaaggcttcaggcta

SEQ ID NO: 17920 - DNA, 391 bp, Arabidopsis thaliana
  Clone ID: LIB35-048-Q1-E1-B6
agcggaaaaaaaacaaaaggtcgtgaatgtctctgtccctttcttcctcagttctcacgcaagcttcaacgagaaaagatcggaatctcgccgtcggtaaagcgccgccgtaagtaaaagacggaaaaccagaagaaggaggagattgtatttatgtgtagcagcgtttagtgtgaggaaggaggagattttgtatatagttagaatttgcttcgaagacgatgtcgctgagaattaaattagtggtggataagtttgtggaggagcttaagcaagcacttgacgctgatatacaagatcggatcatgaaggagagagagatgcagagttatatagaagagcgtgagcgtgaagtcgctgagcgagaaactgcctggaaagctgaactccc

SEQ ID NO: 17921 - DNA, 413 bp, Arabidopsis thaliana
  unsure at all n locations
  Clone ID: LIB35-048-Q1-E1-C6
cgcattgctcagtacagagctggaatcgtccctgtttcctacagaagggttccttgcaggagaagaggaggaataagattcgcgataaacggccactcatacttcaaccttgtgctgatcacaaacgtcggtggtgccggagacgttcactcggcggcgatcaagggttcaagaacagtgtggcaagctatgtcaaggaactgggggcaaaattggcaaagcaactcttacctcaacggtcaagcactttcctttaaggtcaccaccagcgacggccgcacagttgtctccttcaacgccgctcctgccggctggtcttatggccagacttttgccggtgggcagttccgttaaaaanggcaagttggttaatctctcttccatttatctaaagtanactcatttgtgtggta

SEQ ID NO: 17922 - DNA, 414 bp, Arabidopsis thaliana
  unsure at all n locations
  Clone ID: LIB35-048-Q1-E1-D1
gctcgccgcctcctatatctcttctctctcgattaatatctccaagagcaagcttcgttttcgtgtggtgtcgtttctaattgtgattttttaatattgcatcaaaatgtcgaagaagaggaaggctcgtagcggctacttgaagaagtcatcacaaggaggagacgaagctgtggtacagcgaagaaaactagttccaaaacctggtaaaattgggaaagagattgatgatatctttgctgggagatctcagaggacgccagaggtccaaaatcccgagtcgaagagacacgccagaaagcccaagtatccgagtccgagagacactagagctgagatgaatgagctcaatgttggggtcaatancaacactgaaaagcccnacctaaggacgagaattctcaatnacgacac

SEQ ID NO: 17923 - DNA, 238 bp, Arabidopsis thaliana
  Clone ID: LIB35-048-Q1-E1-D11
aataggcctgcttggtacaaggagaaagtatatccagagaacaaggttttctatttataactcacgagttcatatgtgacattccacttttggttatgacttagtggaaacttctcgttatctttttcaggtgccagcgcttgagcacaatggaaaaatcattggggagagtctgggattttgattaaatatcttgataacactttgaaagggcctcccctttaccccgaagattatt

SEQ ID NO: 17924 - DNA, 195 bp, Arabidopsis thaliana
  unsure at all n locations
  Clone ID: LIB35-048-Q1-E1-D2
ctccgtagctagtgttttagtttccgtctctgtttggagattgtgtagaatgttttagtgttattattaaacaagtcatttgaaagatttttggattcatactgagaagacccaaactatgttgcaagctctacttaccagaatgtttaagaatattgagtttgacaaaanaananaancaannnaacnnaaaaa

SEQ ID NO: 17925 - DNA, 399 bp, Arabidopsis thaliana
  unsure at all n locations
  Clone ID: LIB35-048-Q1-E1-D4
gaagaagacactgattggtcttggnttgggacagctcctctcacttcttgctacttctaatggctttacatcttctgagctcgccagaaaangaattaatgttccaacatcacaatgctttctgaattatgtgttactggcatttgctactacagctactggactgatcatatactccatgaangagaaagatcaanaggaacacagatttgaagaagtgggcgacgaggcggctatgcagaggaagttgttaggtgaggatgatgagccgggaacctaaccacataggtttttgtcaattccatcgactgtgtgatattatattattgcatccagcaaaaataaangatcttttgagtngagaaaagttaaggacaccgttggtgactgttaanagtg

SEQ ID NO: 17926 - DNA, 160 bp, Arabidopsis thaliana
  unsure at all n locations
  Clone ID: LIB35-048-Q1-E1-D9
ttacagctttgttgttttcatgaagacacttcacagtttttttcttttttcttgttcagatactcaaaaagaggaaacattttgtgaacctagtttaaccacacatttgggatcaatctctagtaaaaanaanangnnnnaangganngaagaaaaaaag

SEQ ID NO: 17927 - DNA, 399 bp, Arabidopsis thaliana
  Clone ID: LIB35-047-Q1-E1-A10
agtagatctctcttttctctttctctttctcctctctctctctttccttactcagcttttgtggtgaatattgaagaaagtttctctgatatttgttagatggaagaagattgcgaagtttcgacattgggatgagttgattccagatgctcttggtttaatctttagccacttacctcttcaagaagtactaacagtggtgcctagagtttgcaaagcatggaacagagctgttactggaccttattgttggcaagaaattgacattgagctgtggagtaaccgttttcaccaagtctgatcatcttgaccggatgcttgagatgttggtccctagaagcgctggctctttgcgaaaactctcccgttactgggccttcgaaatgactctaacctctc

SEQ ID NO: 17928 - DNA, 405 bp, Arabidopsis thaliana
  unsure at all n locations
  Clone ID: LIB35-047-Q1-E1-A4
tctcggagaagggaggaaaaatggcggccaaaaccctaatcaggtcaggagcttcgttgatgaatcggtttctaacgaagccgacaacgaatatcgtgcagaacaatctcagatcttcttttcaatacatagctcctcagggacaagaaatcccgccgtattttttcccgtcgttgtcgaatctacagagctcactcatttcgcgccctaacgacactgcttcgctccaggaactcaacgaacgtggatttctttacccttcaggtcttccttcactcgaattcttcttgccanaagttgatccttcaagtgagccattgcttctgtttcctaagaggacattccaaccaagcactataaggcgtaaacggaaccatggaattctttgctccggaaggcaaccaa

SEQ ID NO: 17929 - DNA, 138 bp, Arabidopsis thaliana
  Clone ID: LIB35-047-Q1-E1-A7
cgaagcaagcgattgtaaagagtggaaccgaaactaaaaaaacttttgagtgtgaactttgttcgtctgataattccaagaatgtatacaaatttgcaggaaaatattgaaaaatgtcagtgtttagtaataaaagta

SEQ ID NO: 17930 - DNA, 288 bp, Arabidopsis thaliana
  unsure at all n locations
  Clone ID: LIB35-047-Q1-E1-A9
acaacacatacatctatacattgaaaacaaaatagtaataatcatcatggctaagtttgcttccatcatcacccttatcttcgctgctcttgttctctttgctgctttcgacgcactggcaatggtggaagcacagaagttgtgcgagaagccaagtnggacatggtcaagggtttgcggaaacagtaatgcatgcaagaatcagtgcattaaccttgaaggagccaaacatggttatgcaactatgtcttccaacacacaantntnacccgttacntccaagttaaa

SEQ ID NO: 17931 - DNA, 433 bp, Arabidopsis thaliana
  unsure at all n locations
  Clone ID: LIB35-046-Q1-E1-H1
gggtgagaanaagatcgaagagaagaataatttgatcatcttgtgaagaaaaataatggctgcttcagtgatgctatcttcggtgacattgaaaccagctggtttcacggtggagaagacngcggctagaaggattaccgtcgctcacaagagctcgtccctccttcaaaattgtcgccaagtggcgtcaagaagatnaaagaccgacaagcccttccgaattaacngcagcatggaccttgagggacggcgtccacgcctccggcaagaaaaggcaanggatacggtgtttacaaagttcgttcgacaagtattggaagcctaaacgtcgatggatacaatccctaatttacaaacgaagaaccaattggtccaccaattggttnaccttntacnaangggaaaggagtcnaccggaattngcaaattttgg

SEQ ID NO: 17932 - DNA, 426 bp, Arabidopsis thaliana
  unsure at all n locations
  Clone ID: LIB35-047-Q1-E1-B1
aatggacaaagtcgtggaggtttatgaaagagcagtgctgggagtgacatgttcggtggatatctggttgcattattgcacttttgccatcaatacatatggagatccagaaacgatcagaaggctttttgaacgagctttggtttacgttggaactgattttctttcctctccgttgtgggacaaatacattgagctaaaaatcgtcgtcggtggacgcaacagagagaaaggtgaagcaatggtggctaagctgggaanagaattctgaattttctcaagtagatatcaatgatgctaagatgcttgagacaaagtttaagagacgttgatcttgtagtccatgcccgctggaccattccaacaaagcacctcgatgcactgttccttgaagctgccataaangancaaagactgcatatctcc

SEQ ID NO: 17933 - DNA, 217 bp, Arabidopsis thaliana
  Clone ID: LIB35-047-Q1-E1-B5
agaagcaaaagaaagtgacactaacgtgtacatattccggtgaccggggagtctctaaatcctatggtgaagctcttctctgcaaaatctcaaccatcaagcgtttgatatgtccttcaaggaaacaataactcagagttgcttgatgtttgcttttattatcattttctctttccaataaaatgaatcttttatgtcgaatgtgattggatattgt

SEQ ID NO: 17934 - DNA, 396 bp, Arabidopsis thaliana
  unsure at all n locations
  Clone ID: LIB35-047-Q1-E1-B7
aacaagaaacagagagagataaagagatcacacgtgggaatccaacttaccaattgcaatggcgtcaatgaccatgacatcttcatttctccctaccgtctcaaaccttccggcaaacatctccagcaacagcagangaagcctcacggtggtcaaagcctccgggagtgaaaacacaaccaagcttggagaacaacaagcaagaacanagcatgaanatgaggagggatcttgtcttcacagctgcagctgcagctgtgtgctccttacctaangtggcaatggcagacgatgagcccnagagaggaacaganngctgccaaggaagaagtntgctccagtctgtgtcacaatgcctatccgccnagaatatgcccgtaactgagtttgctatgt

SEQ ID NO: 17935 - DNA, 419 bp, Arabidopsis thaliana
  Clone ID: LIB35-047-Q1-E1-B8
ctctgagagaaactcttcttcttcactgcaaacgcttttgagacaaagttcgtcacttcgatctgaattataacacttcgtgcgagaatcgaaataatcgaaggttcaagatgggttggatcggagaaactgtagattctatcaaatctattcagattcgtcagcttttcactcaggccatcagtctagggatgattgtcacatctgctttgatcatatggaaagctttgatgtgtgccactgggaagcgaatctccggtggtggttgttctctctgggaagcatgggaacccggttttaagaagggggatatattgttcttgcacatgagtaaagacccgattccaagcaagtgaaattgttgttttcaatgttgatgggtcctgatattcccattgtccatcgtgtcattaaggttc

SEQ ID NO: 17936 - DNA, 409 bp, Arabidopsis thaliana
  unsure at all n locations
  Clone ID: LIB35-047-Q1-E1-C2
agaagcagagattcaaacattcctctgcagattagtgaaagcaaatcggaagaagcagcgaatcagcttcagatgggagattcaacatttctcgatagaatgcttctccagcttcgctccacttgcaagtattacagcggttaccctaaggatctcgggccatcgcgggttctccattttacatcaagaaggagagtttgtccaactccttcaccanggctatcctgtggttgtcgcattcaccataaagagtaantacacacaacatcttgaccggatgcttgaggaagctgctgctgagttctatcccaacataaaatttatgccgtgttgagtgttccaagtatcccggattctgcataactcgccaagaaaaatgaatatccnttcattgaaatattccatancc

SEQ ID NO: 17937 - DNA, 409 bp, Arabidopsis thaliana
  unsure at all n locations
  Clone ID: LIB35-047-Q1-E1-D2
agcaactggtccaatctttgaacttaagaaaaacgtttcattgttgttttatgtgtgattgttgttctgtttttgatttgagaaacaaaaacgatggagatgatgaagattgatcctttattcgatcgtgccagtgagcttaaagctttcgatgaaacgaaaacgggtgtgaaaggactcgtcgactccggagtttcacaagttccacgcatctttcatcatccaactgtcaaattatcaaccccaaaaccacttccctcggacctgctacatctcaagacgatcccaacgatcgatctcggaggacgggacttccaggacgcgattaagcgcaataacgcnattgaagagattanagaaacagcaagcgaanttggggtttcntccaggtgattaaaccaaggagntt

SEQ ID NO: 17938 - DNA, 402 bp, Arabidopsis thaliana
  unsure at all n locations
  Clone ID: LIB35-047-Q1-E1-D5
acacgaaaagttagttaagcagcaacaaaaaaaaaacatggagaaacagaacattatctcaaacacttcttcttcgtcttcttggattcgtggttcttgtgttggaagaggttgttttggtacagtaagcaaagctttgagtaaaatcgacggtggacttttcgccgtgaagtcgatagatctcgccacgtgtcttccttctcaagcagagtcgttagagaacgaaatcgttattctacggtcgatgaagtctcatccaaacatagtgaggtttctcggtgatgatgtgtctaaagaaggaacggcgtcgtttcgaaatcttcatttagagtattcaccgggaaggtgacnttgcnancggttggannccgttaangaaacgccttctcacgcgttacgttn

SEQ ID NO: 17939 - DNA, 416 bp, Arabidopsis thaliana
  Clone ID: LIB35-047-Q1-E1-E1
aattcgatcgatagtgacgagaaagatcctaagatggcgaccgcaagcgagagttcttcatctaagagatggcttccacttgaatctaacccagatgttatgaatcagtatctctggggacttggtcttgcccctgatgaagcagagtgcaatgatgtgtatgggttagacgatgaacttctagagatggttccaaagcctgttcttgctgttctcttcctttacccaatcaccaaaaagagtgaagaagagagaatcgagcaagacaaggaaattaaggaaaaggtgcatagcgataaagtttactttatgaaacaaactgttggtaatgcttgtggaaccattggtcttcttcatgctattgggaatattacctctgaaatcaaactctccgacggatcgttcttggatagatt

SEQ ID NO: 17940 - DNA, 508 bp, Arabidopsis thaliana
  unsure at all n locations
  Clone ID: LIB35-047-Q1-E1-F11
tctggcctcccggtccggaatnccgggtcgacccacgcgtccgcccaggcgtccgtacngctgcgagangacgacanaagggggcaacagcancanaagtggacagaacattatccnaattatggancaanancangaaggcanagcaacgaaagaaagaattcaagtgaatgggtacttgttatacaaaacctcacccaaatccccacgtactgacgcatctacccctccaaactcaccgatattacanccaatccaccgccgtgaaaatccaacgatcaacgacgatgatgaagattctgttgtcccctccancgtgaatctttggcttccgtggcgagtgattgagactaccaagaagcgattaatcaagaactcagtgtgcatctttcangccgtcgaaagggtgcgttgtagttacctaactcgtaaaatggtaatttggtcattaacaatcaattgangcntcctcgttggtcctgaagccntgttaagtgaagcccctgaa

SEQ ID NO: 17941 - DNA, 409 bp, Arabidopsis thaliana
  unsure at all n locations
  Clone ID: LIB35-047-Q1-E1-F4
cacgtgaaatcggatccaatcgatgattccggcgaggaggtttctcttatctccatttgtcggcgtcacgtttatcgtcgttctcgtctctctctacttcagatcttccttcaagtctccacaacaccaatatcaaaagaggttattttctgctgaagaattggcattgtataatggtactgatgaaacattacctatactcttagggattcttggatctgtgttcgatgtgacgaaaggaaaatttcattacggtagtggangaaggtacaaccattttgctggaaganacgcttccccgtgcaatttgtttcctggcaactttacaaggagatggacttacagattccttacaaagggtatcctaaccanttaaggtgaanaancattgttgactggcgaaggtttc

SEQ ID NO: 17942 - DNA, 417 bp, Arabidopsis thaliana
  unsure at all n locations
  Clone ID: LIB35-047-Q1-E1-G10
agtcgtgcttgtcgatggcgatcaaagcgggaaaggtgttgagaacggcgactgctgctgcgaggaagttccaacagaaacagttctcagcctcatcttcggcgtttccagagccaccaccggtgtctccatcttccggtgtaggagcatttctgggtattcccaagattattcgctcggaatccgatttattagtctccaagtacatcagaattgcccagggtcgattgacgaagaagggtgattacacagaggagaagctaaaggaaatgttgtctggtgaagacagggtagggatcggtgagaccatgaagttactcgagggtcgcaacactggactagtatcttctaaaaaaccaaactccggtcgattcaaaaattgatcctcngtttccatcatcaaactttcaatttcaa

SEQ ID NO: 17943 - DNA, 210 bp, Arabidopsis thaliana
  unsure at all n locations
  Clone ID: LIB35-047-Q1-E1-G2
agagagaacaacaaccaaacactcatttctccacatcttgagagaaaaaaacagagcaagtatattanagatccatggcgatggcggtctccggagctgtcctcantnggcttggttccttcgttcctcancggaagcaaatagaagtgccaccgcattggcaaaccggcgtangcactggagctcaaanaatttgccaggaaaactcct

SEQ ID NO: 17944 - DNA, 408 bp, Arabidopsis thaliana
  Clone ID: LIB35-047-Q1-E1-G3
caaccaagaacttttattcaaagagatctatacaaacagaactcaccaatcttatctctttccttctccaccttgctttccaatctcaagctttaactctccctgaaaatgatgataaacgcaaagaagctcatgaagttggccaagaaatggcaacaaagagcagcctcaagagaaaaagaatttcatttcaagagatcaagtattactactagcagccaaacagctgtagaaaagggttgtttcgtggtttacacggctgataagatccgtttttcatttcccttaagttacctaagcaacactattgtccaagagctcttgaaaatatctgaagaagagttcggtctcccgacggaaggaccaatcacattgccattcgattcggcctttttagaagtatcccat

SEQ ID NO: 17945 - DNA, 385 bp, Arabidopsis thaliana
  unsure at all n locations
  Clone ID: LIB35-044-Q1-E1-C9
caaaagcaatcttggagaagtccgagggtaaggtaaggcttacgggtctaggagcaagagacagtctcaggttagaagcaggactttgtctatatggaaacgacatggagcaacacatttctcctgttgaagctgggctcacatgggccatagggaagcgtagaaganccgaangtggatttcttggcncggatgtgattctccagcagcttaaanatggacctacaatcagaagggtcggtttcttctcctcagggaccaccccgcaaggtcgcatagcgaggttcatgatgagagtgggaacaagattggganagatcacangtggagggtttanccccgaacctgaangangaacatagccatgggatatgtgaagtcaggt

SEQ ID NO: 17946 - DNA, 423 bp, Arabidopsis thaliana
  unsure at all n locations
  Clone ID: LIB35-044-Q1-E1-D1
gaaaggcttagaaatggtggtgacgtctttctcttcagcgccgcctatcttcttcttacctggagctgatgctcagttttcttcttccaatggaaggtttgctattccttcctcttctctcgtaaagggactaagaagacaccaagatgcaaagttggtgggcaacagagccagagttggagtagtacgagtcctagcgaacccaaatgtatctcctcctcctcctccaggaaaagcaaaggtaaaaaagaggtaatcatggtaggccctcttgaggctaagcggttagctagtaagcaaatggaaagagattaaaggcagagaaaagcaacagagaaggcgtgaaatagaaggctattaacgggagcatgggcaatcataggactcatgataaggctggtgatcnaagctcaaacggggaaa

SEQ ID NO: 17947 - DNA, 457 bp, Arabidopsis thaliana
  unsure at all n locations
  Clone ID: LIB35-044-Q1-E1-D2
aaaacagaacaaaaaattatattcaagagaagaangaaaaaatgaattgcatctccgatcaggtaaagaaactctcaagctcaacaccaagagggagccaagaccacaaacaaagccaagtcgaaagggaaccganacaagctnacaaagaacaaactnacaaangcccgaacctcaatgggcaagttncaaagggttgtaacctnaaagttgnctcaaagcccgcaactcctnacgaatcaagacnaactccgaacaagggtnaagtcnccggancctctgctgatatcttaaacgctgccnagaaatncggtaagttccatnaaaagaattacactggtcagtaactcnacaaggntgagaaatntctcnacgactnccantcctcaaantccaacggtgctggtggtcctcctccttccgnacaattaaggctgagccaagcaagtcagcctga

SEQ ID NO: 17948 - DNA, 429 bp, Arabidopsis thaliana
  unsure at all n locations
  Clone ID: LIB35-044-Q1-E1-D4
gtgtttctgtttttctctaatttttctcttgttgttctcgattaacgaaaaagacttgtccgttctcaattcttatcgatttaagancaaatcatctaacgaagattacttccgaagatcagaaacaaacacaaactgtgaatcgttgtttgttaattctctttaaaatcgccagaagaaagagatctccgttttctacagaagaaaagcaaagagaagtaagaatggggatcggaacaaaaccgatagcactaagcttcacgccantcgcaaagcttcagannccaaaagctatgttgttaaanggatgtggtttccttggaatcaccaatcanacatggatctcctggttctaaaatgtttacaagaaggcattttgttgctgaaggaaagctcaaaacaagcaagttgccaaaagctgctgtttga

SEQ ID NO: 17949 - DNA, 384 bp, Arabidopsis thaliana
  unsure at all n locations
  Clone ID: LIB35-044-Q1-E1-D7
ggaaaaaaaaagtgagcgtgttgatgcataacgaacgatgccattttccgcatcaatctcatcgccttcttcttctgtcgcgcttcttcgatcgcctctctctttcttcatcttcactcccaaaaccctaatcttcgccagaaccaggatctctggtttcccttatcttgcttcccggcgatcccgcgatttcatcaacgggagggatgatttcgctgacgatacgaggagctggaaccggaaagatcaaaccggagtatgggttcnnnnnnnnnnnnnnnnnnnnnnnnnnnnnnnnnnnnnnnnnnnnnnnnnnnnnnnnnnnnnnnnctgttacttagatttgtanaaaatgttttcaagaaagatttctaagagagcaag

SEQ ID NO: 17950 - DNA, 385 bp, Arabidopsis thaliana
  unsure at all n locations
  Clone ID: LIB35-044-Q1-E1-E12
caagtgtggagttatcagtcctcgtttcgatgtcggtgttaaggagattgaaggatggactgctcgtctacttccttccagacagtttggtttcattgttctgacgacctcagcgggaatcatggatcatgaagaagctaggagaaagaacgttggtggcaaagttcttgggttcttttactgaagcagggtctcgagatctatcttatcgggttatagtttggttctctgtaagtcgattgacctcactgtcaaagtagtangttttatatgttgtggtcgctcggatacgtaaaaacttggagatgagtanactaattaatttcangtttttgaantcgttagacttgcgatttatgaaatcaaaatcatctttcttgactaa

SEQ ID NO: 17951 - DNA, 417 bp, Arabidopsis thaliana
  unsure at all n locations
  Clone ID: LIB35-044-Q1-E1-C4
ggaaaaaaaagagagaagacgcacaccgaagaaaacacacaagactccattattctcctgcttcttcgtctcttcaattattttctctgagactagctttgattcaaccatggctaatgcagcatcagggaatggcagtccatgatgactggcaaagcttgaaatttaagggattngaagaacaaaanggaaaaacgtttnaacnattaaaagaatgaagaagctgcanaaacaagtnattgntggagaaaatcngtgaancgggtcnaacccatganggacttgccgcaagtcctccaactgaagaatgccnncaagccaatttcgaatttgattttgtcaagttctgaaggtgtccaaaggacaaggatttttttcgtggcatggtcctccggacacaagcaaagaattaagaag

SEQ ID NO: 17952 - DNA, 419 bp, Arabidopsis thaliana
  unsure at all n locations
  Clone ID: LIB35-044-Q1-E1-E5
ctctgtttttgaaagaagttttacagagtcgatcgtctaaagcgttgttgaagcacttgttagtggtgctctgtttcaagctggataaacccaatcctattgggatttggctggattttataccatattttagcatgattgtttgataaacgcttgataaattgcctcttgttgtcacctttgctacgaaaatgtctctggtttgctctttatcttgtgtagctcccttgccacagactaaacaagtcgcgtccaagttttctgaaactcgaaacatgtaccttaagtttatcttctcccgctggctatcctaattttaccaccggtattaggaagcatatcagttacttgttcactgaaccgatcaagcttcctaggctancanagagtccggatattaagttagtcaggagtctttt

SEQ ID NO: 17953 - DNA, 462 bp, Arabidopsis thaliana
  unsure at all n locations
  Clone ID: LIB35-044-Q1-E1-F8
gctcgtagcgccactgcctttggtgtgacggagctaatcctcgtcggtcgccgtgatttcaacgccttcggtagtcatggttcagcttctcacatccgtttccgccattttcactctctcatcgaanctcgcaactatctcaaggaggagaaagattgcgatatatgcggcgttgagattgcangatggagcttctgcggttaatgaacaaccctttcaaaagaaacactgcgtttcttctccggtaaatganggatnagggattatcctgcgaaaggatacgaaantatgccgaacttccttttgtntaataattcctcaagtatggctggtnggcactgccctcntttgaatgttaactggttgnaccntccaantgttnttgnnatcnactttgngagtttggggctgggatttcngnancgtgtttcgggatggnaagcaaaattataagcggnctga

SEQ ID NO: 17954 - DNA, 426 bp, Arabidopsis thaliana
  unsure at all n locations
  Clone ID: LIB35-044-Q1-E1-G1
aagagaatggcgaaggaagcggtcaagtatgtatgggaaggagcaattcctctgcagattcatctccacaaatccggcgtcgcttctcaccctgctcctcctcctgctcttgtgttagcaccaagaataggatatttgcctctgttgattcctcttataaagccttatttcaaggattcacttcctcctggtgaagattcaatttggtttgattacaaaggatttcctctaaaatggtatataccaacaggtgttcttttcgatctcctttgtgcagaacccgaaagaccatggaatctcacgatacactttagaggatatccttgcaacatactgataccatgtgaaggagaagattctgtaaaatggaactttgttaattctttgaaagangcacaatatatcatcaatggaaattgcaagaat

SEQ ID NO: 17955 - DNA, 382 bp, Arabidopsis thaliana
  Clone ID: LIB35-044-Q1-E1-G11
tgttggtgtcctccatggagctatgagttacttgctgcaagatgatgatggacaaatcattgaaccacactccatcagtgcaggattggactaccctggagtcggacccgagcacagtttctttaaagacatgggacgggctgaatactatagcataaccgacgaagaagcgttggaagcgttcaagagagtgtcgcggttagagggaatcattccagcactggagacctcacacgcactagcttacctcgagaagctatgtcccacattatcagacgggacgagagtggtcttgaacttcagcggaagaggagataaagatgttcaagacagtggctaaatatcttgatgtttgaagagagaaacacttatgtttgttttt

SEQ ID NO: 17956 - DNA, 456 bp, Arabidopsis thaliana
  unsure at all n locations
  Clone ID: LIB35-044-Q1-E1-G12
acgcgtccgagatgagttatcttctgaagacgttaacgacgaaggaagagattgatcgggttatcagagacaccattgatgaagttcttgttttacgatttggtcgttcctccgacgccgtttgtcttcagcatgatgaaatccttgcgaaatcggtgagagatgtttcgaaatttgctaaggtagctttggttgatgttgattcagaggatgttcaagtgtatgtgaagtattttgatatcacgttgtttccttcgacgatcttcttcttcaatgcgcatcatatgaaattggattctggaactgcggatcatactaaatgggttggtgcatttcatataaaacaagactttattgatgttgttgaggctatatatcgaggagcaatgaaagggaagatgattgttcaatgtccaataccgccaagagangataccaaaagtaccagctccgtgt

SEQ ID NO: 17957 - DNA, 447 bp, Arabidopsis thaliana
  unsure at all n locations
  Clone ID: LIB35-044-Q1-E1-G4
aaaacagagagagagaacaacaaccaaacactcatttctccacatcttgagagaaaaaaacagagcacgtatattagagatctcatggcgatggcggtctccgggagctgtcctcagtgggcttgggttcttcgttcctcaccggaggcaagagangtgccaaccgcattggtaagcggcgtangcactgggagctcagagaattggcaagaaaactcctattgtcgctgctgcggctgctcagcctaaagaaatcttgggattcctgccgttaaangtggtggcaacttccttgaccctgaattgctccnatgnctccctaccaaggagaattccggttccacccattgggtttggggaaaaaacccggcttttccgaaaatggtacaaaaaaggctgancctgatccaatggccgatggggccaatggaancggttccttgggat

SEQ ID NO: 17958 - DNA, 398 bp, Arabidopsis thaliana
  unsure at all n locations
  Clone ID: LIB35-044-Q1-E1-G9
tgttgatgattctgcttttagtgagattagcattgatgaattgagggcttatgctcgtgatattatggagaaagagattgaaaagcatgctgctgatggccttggccgagttgattatgcattggcttctggtggtgcttttgtgatggagcattcagatccttatcttgttggtaaagggagtagctggtttgcgactaccatgcggcgcgctcatacgaatgcggttaagatgttatctccgagcttcggtgagcctggacaatgttttcctctgaaaggtagcgagggctatgtgcaaatcangctgagaggaccaatcataccaagaggctttcacattggagcatgtagctaagagtgtanccnaacgacagatcgagtgctccaanaagatt

SEQ ID NO: 17959 - DNA, 418 bp, Arabidopsis thaliana
  Clone ID: LIB35-044-Q1-E1-H10
atgccagaggggatatctccgagtctggcgttcatagtgcagtcttgttgggtggaggacccaaacatgaggccaagcttcagtcaaattatcagactgctcaatgagttcctccttaccctgactcctccgcctcctcagcctctgcctgagactgccaccaacaggaccaatggccgagccatcactgagttctccatccgtccaaaagggaaatttgccttcattcgccagcttttcgctgccaagaggaacataaactcttaggtacaagaaggggtcttctttgtctttgccactgccactgctttggtggataaatgacattagcaagagagagagaagtagaaagttagacttacttaaagtctatagcgtagttaagtactcaatcctcctcctgtcaagtgattaactg

SEQ ID NO: 17960 - DNA, 428 bp, Arabidopsis thaliana
  unsure at all n locations
  Clone ID: LIB35-044-Q1-E1-H3
gcaaaagaacagaatgagttctaagtttgatatcggctccttaagcatagtaatgactctgcttatttgcttcttattattatctttggctccaaaacttgaggctgagctcgcaacggtccaacatgctccaaaccccgatggctctatcagttttctggtgattggagattggggtaggcatggactctacaaccaatcccaagtcgccctccagatggggagaatcngggaggagatggatatcaattttgtgggtatcgacgggtgataacatctacgataacnggatgaaaagtatcgatgatcccgccttttcaactctcctttagtannatctacacttctcctagcctgcaaaagccttggnaccttgtattggggaatcacgactatagaagganatgtttgaggacaattgagtccta

SEQ ID NO: 17961 - DNA, 74 bp, Arabidopsis thaliana
  unsure at all n locations
  Clone ID: LIB35-043-Q1-E1-F1
ctcggccaacgttcgcccgggtttcccccgtcnaaggctccnaaatccggggggtcccctttaagggttcccgn

SEQ ID NO: 17962 - DNA, 395 bp, Arabidopsis thaliana
  unsure at all n locations
  Clone ID: LIB35-043-Q1-E1-F10
gattaaacagattcgctcagttctcaaaacgatgaaagtagcggagaagattgttttcctctggaatgattccgatggatttgctgcaaccatttctgatactttaaaccctagccctagttcccctcttcgcaaactagaagaacagatccagcttccgttggataagtatggcgttgaaggtgtggaaaccggcgggagtatcgttcatttcgtanatgaaaatgaagtttatcaggtctcgatttttcttcttcgaagttatgagcctccagtactaagtgtgtgctatgaatgaactgctggacctaattacaaggggatctcaactctacccacaatcatagctcctttccttgtgggcgggatctaaagctcaaagttcaattaacaga

SEQ ID NO: 17963 - DNA, 424 bp, Arabidopsis thaliana
  unsure at all n locations
  Clone ID: LIB35-043-Q1-E1-F8
cctttttctctcacttacccaataagagcttttttcgcgtttcccaccgcaaccaccgtcaccttcaaccgccggagccgccgcaaggaaggctcatcatccgccgtggtaattttttgaggtgtacaaagcattgcctatttgacgaaccaaggaaatggttaaaaggcatggagagttttgatttacaagatatatcatgtcgcagtngcatagacggtttcaagcatgtatgctcctcttttttccgggtgttttgatatncgatatttacanacaatctggaaggccttggtgaccctgaacttcttgcgaaaaaaaacattttttangcgtgagtggaaatnagaaggccctctatgaagcccggtttantgaaantcaacanntgccggtgaaattgaagaatgggggctaatnaaac

SEQ ID NO: 17964 - DNA, 417 bp, Arabidopsis thaliana
  unsure at all n locations
  Clone ID: LIB35-043-Q1-E1-G11
gaagttaaaaaggcgaaaagctacagaacccttttggaagcggtgttgcctatctttaagagcgtcggaggtgatataactgggagactcttgatgagatgttggcctatctggaatacttcccagtagcgagaccaacggagctgaacaccgtcaacaacgcacctacaacccatctcaagagcttggacacgagggagaaggttggtgcctggatcaaacagtggtgcatccaaaacgcaagccatgtagctttttgtttcgggttctacatggccattgcgaagaanggtgaccagttaccctaaagacgtcctgcgctttgaggggaactcaagaagacaatttgaactttttntctttagcactcatagaanaagagcananagaccannacggataatatgaagtctttan

SEQ ID NO: 17965 - DNA, 388 bp, Arabidopsis thaliana
  unsure at all n locations
  Clone ID: LIB35-043-Q1-E1-E9
tcacacagataataatcctcagcttctctctcgctggatttcaacattcttccactcatcgcttctctttaccaaatcaaactcaacacttcactcaactcttatcggaccttccaaactatatccttcaatggatctatggactcttcaattanaagacgtcangatccgaaancctatcttctcatcatcgatccctgagaaatcatcgtcgttttcnaggaaactttgtgaattggantttaggtttctcaantcgtaaggtttctgcttctccgtagcgttccttgggttgttcgangctagctcgnangaaagagtaacgacgattcttcgtctcctgangcttcncaggaaanacaaaccttctaaccggcaanaagtccgg

SEQ ID NO: 17966 - DNA, 185 bp, Arabidopsis thaliana
  unsure at all n locations
  Clone ID: LIB35-043-Q1-E1-G12
agagagattcgatttctctggatttttcaaaaatgtttctccaatcgcaaaaactatggacgatgcttctaattctagcgatttggtcaccaaatttcacactcgcttcacttcgatntacactcaggtcgcaanaaagtnantngctgaaaaaaccctcnaatattttaggctcaagttcatca

SEQ ID NO: 17967 - DNA, 435 bp, Arabidopsis thaliana
  unsure at all n locations
  Clone ID: LIB35-043-Q1-E1-G3
cagaatctgagaataagctaaccgattccgatttcgagttcgtcgccgggaggaatgaaccggttgaaggagcaaaaggggccgaagttcgacggcgaagaatcacctccacctgattttgatgaagatcgaagtgtgggtgaggtagacggaggagatcacacgccattcgctgggggtaaagtcagaaggaaagcgtctcgctatagagagcatcgtggtgactatcttcacgtttcttctcgtcctggattgatgcgaattctggagaaacaaggtgatacatcgattctttttgctgataaagttttgaagttcaccggctcggggaagatgaaacggcgtatttttatcctcactgattttgcgatctatcctaattgattcccgagactgaagcctatgaccaagagaaattgcnttgtcatcagtaga

SEQ ID NO: 17968 - DNA, 424 bp, Arabidopsis thaliana
  unsure at all n locations
  Clone ID: LIB35-043-Q1-E1-G6
agccaaacataaaaaaaaatcaatacatatgcaaatatatagcaacaaccgaacgatgaggaccaaattttcacttaatctgatttctccggcgaagaacatggtgaagattcatcctgacaaggcgtttcctgtggattttagcgtgggagaaggcaagacttcgccgtacttaacgacggagaaagagagtttcacgatttggatgagatctcttgtgtttcatagtaaaggctgcacagtttttgattccaaaggaaacttaatctatcgagtggataattataactccaagagttgtagtgaaagtttaccttatggacttatacggcaaaatcntgtttacattacgtcaaaagaaattgggattattcaaatcttggaaaggatataactcaaccggggacaagattcaactaagaaa

SEQ ID NO: 17969 - DNA, 428 bp, Arabidopsis thaliana
  unsure at all n locations
  Clone ID: LIB35-043-Q1-E1-G7
cacagagaagttcataacgcatatggatattacttccacatggcgacttccgatggacttgttatgcgtgaagaaggaaaggataggccttttgtattgtcaagagcaatctttcccggcactcaaagatacggagcaatttggactggagataacacagccgaatgggaacaccttagagtctccattccaatgatattgacacttggtcttactggaattacattctctggagctgatattggtgggttttttggaaatcctgaaccagaacttctagttaggtggtaccaagtgggtgcttactatccatttttcaggggtcatgctcatcacgataccaaaagacgagagccttggttgttttggtgaacggnacacagaactcatgaanagatgccatacacactcngttacacactgctccc

SEQ ID NO: 17970 - DNA, 411 bp, Arabidopsis thaliana
  unsure at all n locations
  Clone ID: LIB35-043-Q1-E1-G9
gagacgcagcgaagtacgggcatgagattgtgccgttgaaaacgtcgaattcgcagctgacgctggaggatatcgccgacgcggctcagccaagtggagcatttaagtgggactctgaaaccgatttgaaggtcgacggttagttatattttatatgatcgatcgtctaatcacaaagaaagtaagggaaagaatcaaggaagtaagaataagaagataataaataaagagaataagaagaggcatttgcaactttaagaggttaaaatttcttaaatgagtctgagtttcgttgtgtgttttgggtgtaccataagaaataaaacgtacggggttgctatgtattttgtgaagtgtgtatttctggttgaatattantcctgcgtaatanaaaaaatatgtgtagtanaa

SEQ ID NO: 17971 - DNA, 262 bp, Arabidopsis thaliana
  unsure at all n locations
  Clone ID: LIB35-043-Q1-E1-H10
gaaaggttctgtgtttanggttctggttctgggaagctcgttctcaccggaaaaccgaagaatatgatcggagtcgggaaaatgaaacagtactccaacgtccttganaagcctctcagcaaaggcaagcaagaggtgagcttgaccgcatttgctttcttattctcggagctcgttcagtacaatcaaacccangttgacaatagtagctgaactnaaaannaagnctanaggatgctnnggtnttcaatttggatttccc

SEQ ID NO: 17972 - DNA, 393 bp, Arabidopsis thaliana
  unsure at all n locations
  Clone ID: LIB35-043-Q1-E1-H7
agaacaattacttccaacggagaatggcctcaattgtcggaattcgaacaagattcctgagtttcgggaagctttcacaaatctcttcttcactgttgagaatacacaatcctcgtaatcatcagaatcctcttattctccctcttccttgtttctctgccgctcctagtcgtcatcgtcctctgatttggcttcgctcatctccgcctgtgtcctcgatgaccactcaggctgaatctgggtcttcccagcaatccgattcttccaaaacggtgaagagtggtgataaagggaagagtacagggaagtgtgctacagaaactggactgttgagaacgctgagcanctggggataaaagggatgggttaggaaccgcanggatggttcagtgg

SEQ ID NO: 17973 - DNA, 415 bp, Arabidopsis thaliana
  unsure at all n locations
  Clone ID: LIB35-043-Q1-E1-H8
agacaattggttatattagctgtcactcccatctttcatattccttcaccatctctctctctctcgatcttgtgaaccactacacacactaacacaatgagagagatccttcacattcaaggtggtctatgcggtaaccagattggttccaagttctgggaagtcatctgcgacgagcacggcatcgattccaccggacgttacagtggagacactgcagatctccagcttgaacgtatcaatgtctattacaatgaagcttcaggtggaaagatgcgttcctcgtgctgttcttatggatcttgagcctggtactatggatantatcaagattcggaccgtttggtcagatcttccgtcctgataactttgtccttgggtcagtctggtgctggtaataattgggctaaangtc

SEQ ID NO: 17974 - DNA, 91 bp, Arabidopsis thaliana
  unsure at all n locations
  Clone ID: LIB35-044-Q1-E1-B2
acacactccttttattaatcataaagttcataaaattaaacaagaagacttttcattaaaagtctcctanatttttggtaagatactgaaa

SEQ ID NO: 17975 - DNA, 423 bp, Arabidopsis thaliana
  unsure at all n locations
  Clone ID: LIB35-044-Q1-E1-B3
ttttccgaanaactaacacatgtcgggacctcantgctgtgaaaacccgccaactcttaacccggtttccgggtcgggtcatgtcgagaagctgggtgggcttgatgcctacgtctccggctctgccnagtccaanctctgcgtcctcctcatttctgagatttttggttttgaagctccaaacttaatggcgcttgcngacaaagttgcatcttctggattctatgttgtggttcctgattactttggtggangatccttataatccctctaaccatgacagacccatccctgtctggatcaaagaccatggctgtgataanggctttgaaaacacgataccactactttaaaccataaagancaaaggcataactgccaattgganccgcnagggatgtnttggggtgcaaaantattggt

SEQ ID NO: 17976 - DNA, 423 bp, Arabidopsis thaliana
  unsure at all n locations
  Clone ID: LIB35-044-Q1-E1-B8
cgtcaaaggttaaacagtcgaaacaatggagattctgaagcttgatgtagcgaagtttccagaaattgaggatacaatcgaattaactaacccaaagagaaacgacgaagtagaagattgcgacgaccaacagaagcagcagctagctacacaagaagatgaagaggaagacgaattgagaaagcttctgctttcagatattggagaacttccgatttctcctccttcagctacacaagtcaattttgtttcttatttcatcacaggattttactaaatcgggtcatgatcaatatatttaccgtcacgctaatgggtttgtgtgtaattggattggctcctacgcatatagcttttaaggatgaangtggaatcactagtgtcgatttcaatgttggtaagtctgatcgtagcgtcntgaaa

SEQ ID NO: 17977 - DNA, 62 bp, Arabidopsis thaliana
  unsure at all n locations
  Clone ID: LIB35-044-Q1-E1-B9
ggctgcnanaagacgacataaggntacngctgcnggaagacgacacaagggtactgccngcg

SEQ ID NO: 17978 - DNA, 447 bp, Arabidopsis thaliana
  unsure at all n locations
  Clone ID: LIB35-044-Q1-E1-C2
agccgattcttctattagccgccatggtgaagtactcgcaagaacccgacaatcagaccaagtcttgcaaggctagaggatccgatcttagggttcacttcaagaatactagggaaacagcgcacgcaatcaggaagctaccattgatcaaggcgaagaggtaccttgaggatgtgatagctcacaagcaagcaattcccttcacacgtttctgcagangtgttgggaagaactgctcaaagctaagaacaggcactctaatggtcaaggacgttgggcaaccaagtctgctcaagtttgttcntgatttgctcaaagaacgctgagtncaatgctgaaggtgaaaanggtttggatgttgatgccctcttcatatcacacatccaaagttgaancaaggccgcaaaagccanaaggagaagggactttaccgttgctcaacggaaa

SEQ ID NO: 17979 - DNA, 421 bp, Arabidopsis thaliana
  unsure at all n locations
  Clone ID: LIB35-043-Q1-E1-A4
agaagagatggagaatactttgtcgccgttgttgtcaccgtcgccggcaagtgaagtcgctgcgagagtatcgtctttgttcgtttatccgatcaaatcatgtcgaggaatttctctgtctcaggcagctctcactcccaccggatttcgatgggatcgaaactggttgattgtgaattctaaaggaagaggattgactcanagagtggaaccaaagctttctttgattgaagtagaaatgcctaagcatgcgtttggagaggactgggagcctgagaagagctctaacatggtggttangagctcctggtatggatgcccttaaggtccccctaantaaacccgacaaaatancaggacgggtgtctcaatttgggagtggtctggctcccgcactagatgaacganaaggagcatcctc

SEQ ID NO: 17980 - DNA, 76 bp, Arabidopsis thaliana
  Clone ID: LIB35-043-Q1-E1-A6
ttacctgacgtttgtgttctttatatccagtcatgtgtttcttgtttcatgaatttggctgacattcttttactta

SEQ ID NO: 17981 - DNA, 417 bp, Arabidopsis thaliana
  unsure at all n locations
  Clone ID: LIB35-043-Q1-E1-B11
aagaatagatccgtccgagctcgaacgcgttttccagatgttcgacaagaacggtgacggtcgaatcacaaaggaagagctcaacgactcgcttgagaatcttggaatctacataccagacaaagatctgactcaaatgatccacaagatcgatgctaacggtgatggatgcgtcgacatagacgagtttgagtcgctgtacagctcgattgtggatgagcatcacaacgatggcgaaacagaggaagaggatatgaaagatgcgtttaacgtgtttgaccaagacggagatgggtttatcactgtggaggagttgaaatctgtgatggcttccttgggactcaagcaagggaagaccctaagatggttgtaagaaagatgattatgcaagttgatgcanatggtgattggtaaagt

SEQ ID NO: 17982 - DNA, 437 bp, Arabidopsis thaliana
  unsure at all n locations
  Clone ID: LIB35-043-Q1-E1-B3
ctctactcttgtcgtcgttggaagaagaggaagagagaggacaagagaatcataagaagaagacatagtcatgggagaggtgaaagtagacgacgatgcgattcttaaatccttcctcgccgaggtcggagaagttgagagagataacgaagtcggcaggattctctcatgcttcaagctgaattcgtttgagcatcttaacctctctttcgattcttccacggatgatgttaaaaggcagtacagaaagatttctttgatggttcatcctgataaatgcaaacatccacaagcacaggaggctttcggagcattggcaaaagcgcaacaactgctgctaaacgaccaagaaagagattatattcttacccaaagcccatgctgcaaaagaaagagcttaagattgaaagagaaagaaaccagttnaagaaagaccc

SEQ ID NO: 17983 - DNA, 338 bp, Arabidopsis thaliana
  unsure at all n locations
  Clone ID: LIB35-043-Q1-E1-B4
gtcaaaggaagtgaaaccttcttcctctttcttgaatccatcaaagaatgctacgaagctcttgtcattgccaaattcttggcattgatgtatagttatctaaacatatctatgagcaaaaacattttgcctgatggaatcaaaggaagagagattcaccattctttcccaatgactctttttcagcctcatgtantccgtttggatcgtcacactcttaaacttttgaaatactggacatggcaatttgtggtcattcgacccgtgtgctccactttgntgatanctttacagctcatccgggttttaaccttcacggttgagctgngacaattcac

SEQ ID NO: 17984 - DNA, 345 bp, Arabidopsis thaliana
  unsure at all n locations
  Clone ID: LIB35-043-Q1-E1-C2
ccaaaaaaaacaaaacaaanaattatattcaacagaaaaaggaaaanatgaatttcatctccgatcaggtanagaaactctcaagctcaacaccaagaggagccanaccacaacaagccagtcgaatgaaccgaaacagctacaagaccagctaccaacgccgagctcatggcaagtgccaacgttgtagctgaagctgctcaanccgcagctcgtaacgaatcaagacatactcgacaagggtaaagtcaccngagcctctgctgatatcttagacgctgccgagaaatacngtnnagttcgattgaaaaggantancactggtcactacctcgacaaggcttn

SEQ ID NO: 17985 - DNA, 433 bp, Arabidopsis thaliana
  unsure at all n locations
  Clone ID: LIB35-043-Q1-E1-C4
nnnnnnnnnnnnnnnnnnnnnnnnnnnnnnnnnnnnnnnnnnnnnnnnnnnnnnnnnnnnnnnnnnnnnngaggatgaaggagagattttccttggtgaatccgatgttctccgnnnnnnnnnnnnnnnnnnnnnnnnnnnnnnnnnnnnnnnnnnnnnnnnnnnnnnnnnnnnnnnnnnnnnnnnnnnnnnnnnnnnnnnctctgttcacacattcactggtcacaaaggtgaagctttatgcattggcttgtagtccaacaggtggaatggacaagaagcttataatctgggatctgcagcattccactcccaggttcatctgcgagcacgaggaaggtgtgacatctctgacttggataggaacctcccaagtactaaccactggctgtgccaatggtacagtgagcatttgggacagcttattaggcaa

SEQ ID NO: 17986 - DNA, 423 bp, Arabidopsis thaliana
  Clone ID: LIB35-043-Q1-E1-C7
tggcgtcttcttcagcgacgctctctctctgctctactttctctgctcattgcaatgtcaattctcgccgttctagcactatcctctgttctctctctaaaccttcgcttaatttggctaaacctctgactggatttctttctccttccactgcgtcgacgtctcgaaccgcattcaccgtcgctccgaaattcgcggaatcagtcgtcgaagctgaaccggagactaccgatatcgaaagctgtggtggtttccgatgtttcggaggttactgaggaaaaagctaaacgagaagagattttccgctgttattaaggttggtggacgccaaatacatagtgtttccaagggagatatctcctacactcaagagggctaaaaagatgcaaaatgttgatgaacaagattgttctcaacaaaagt

SEQ ID NO: 17987 - DNA, 442 bp, Arabidopsis thaliana
  unsure at all n locations
  Clone ID: LIB35-043-Q1-E1-D1
aagaaaccaaagcgaaatcaaaaagctcagcaattttccaagatttctctaattgacgatggcgctttgtgctactactcaaaggactatccgtatagcggcgacgctccggcgtgttgctcgacctttcgctactgacgcggtggttgagtcggattacaagcgtggtgagatcggtaaggtctccggaatcccagaggagcatctttctcgcaaggtgataatatactcacctgctagaaacagctacccaagtcaggatctgggnaaacccggaaaatgggaagattaaacttcctctccaancttaaaattgggagaatcccgtttgattgggatgggacttctacaaggtgaaccctaatgcctaatgttggtggactcctgcttttgcctttttgattctgaagaaggtgccaaagtccttttgctgaancgtcaa

SEQ ID NO: 17988 - DNA, 418 bp, Arabidopsis thaliana
  unsure at all n locations
  Clone ID: LIB35-043-Q1-E1-D10
gcttgagtttgtaaagaaagtagcaagttccactggtgttattcttgatccggtttacagtgggaaagctgcgtatggtttgataaatgagatcaccaaagatcccaaatgttgggagggaaggaagatattgttcatacacactggtgggcttcttgggttgtatgataaggttgatcaaatggcatctctgatgggtaattggtcccggatggatgtttcagaatccgttccaaggaatgatggatgaagcggaaatgttaatcaccgagtaaaacactcttggcagtcacagagtctgcgacaacacgcagatagagttgagtctctaagtcatgtttgtacatatacatacaataactaagacaagtcttttctgtaagacttggtatgaaatgtcnatatatccattaagtac

SEQ ID NO: 17989 - DNA, 414 bp, Arabidopsis thaliana
  unsure at all n locations
  Clone ID: LIB35-043-Q1-E1-D3
aaatcaaatggatcgtcttaagctttatttctccgttttcgctttgtctttctttatcgtctcggtttcgtcgtctgatgtcaacgacggcgatgatctcgtgatccgtcaggtggttggtggagccgagcctcaggttttgacctcagaggatcacttttctctcttcaagcggaagttcgggaaggtctacgcttccaacgaggagcatgactatagattctccgttttcaaaacgaatctcangcgaacgangtgtcaccagaagttggattcgtcggcgactcatggtattacgcagttctcaaatctgactccggtccgagttccgtaagaaacactttgggggttaagaaatggtttaaacctcctaaaaaatgccnaacaaggctccgaatcctcccntaccgaaaa

SEQ ID NO: 17990 - DNA, 414 bp, Arabidopsis thaliana
  unsure at all n locations
  Clone ID: LIB35-043-Q1-E1-D8
agaagacagaacaaaaaaaacacaagaacagggcaaggaaaatgtcggttttcctctgtttcctcgtcctcttacccctgatcttaatcttcttgaacgttttgaaaccttcgaaatataagcttcctccgggtccaaagaagcttcccatcatcggaaacttacaccaacgcaggacactacatccgaggaatcgccgtaatctcgccgaaatgtatggaccagtggcgcttctccaatacggattcgtccccgtggtcgcgatctcttcgaaagaagcagcagaggaagtgctaaagatcaacgatcttgagtgttgtagtcgaccagaggcggccggaatgagagcaactttttacaacttcaaagacatcgggatggcacccttcggtgacgagtggagtctgangccga

SEQ ID NO: 17991 - DNA, 448 bp, Arabidopsis thaliana
  unsure at all n locations
  Clone ID: LIB35-043-Q1-E1-D9
gaagggggctcacaaaaaaaagaaagaaagccagagtaagaaaccatggaagacgccatatatgttgcagtgaatcaagatgttcgagaaagtaaaaaaactttgttatgggctttgaaaaatcttcaagtcaagaagattttccttcttcatgttcatcttccattttcgttgaccacttcttcaagtaggcttgaacaaagtgagatcgatgcaatccaagattcanaactgaatacttcagtanatagcctctacaagtancgtgatatctgcataanacaaaggggttaatgaanaaagatgtggntacatcaatggatctcangacatgatgtgggggaanggattgtggnactcatctatcaanacattatcacgaancctcngttatggggagnaagcagctgattcctccagcaattccaagggggaaangtctatcaca

SEQ ID NO: 17992 - DNA, 283 bp, Arabidopsis thaliana
  unsure at all n locations
  Clone ID: LIB35-043-Q1-E1-E1
gagaagaatagtttgatcatcttgtgagaaaaataatggctgcttcagtgatgcctatcttccgtgacatttgaaanccagcttggtttcacgggttggagaanacngcggctaacaggattacccgttcgctcacaaaganctccgtccctccctcaaaaattgtcnccaagtnggcgtcaagaaanatttaagacccgacaaggccccttccggaatttaacggcaancatgggactttaagggacgggcnntncaaagttccccggccaanaaagggcca

SEQ ID NO: 17993 - DNA, 426 bp, Arabidopsis thaliana
  unsure at all n locations
  Clone ID: LIB35-043-Q1-E1-E10
cgaacaaacatgagcttgacgctgcttcaaggctattcttctnnnnnnnnnnnnnnnnnnnnnnnnnnnnnnnnnnnnnnnnnnnnnnnnnnnnnnnnnnnnnnnnnnnnnnnnnnnnnnnnnnnnnnnnnnncttctgtgtttgatttctctgcatctgcctcctccgctaaaaacgccggccttccttcagctgacgacgttttctctcagatttcagggccaccggagtttctaaacaaccgcacagaagcagataatgaagcttcagctagagatgcagaacatgcaaatcgtattagtcgcaaaaagaagaaagttaaaccaaaaggtgttgtcatggaagcaaaacctcaactangtaggaatccatgagagagttaanaaacgatattngatgcaaccccaatcttcagaagagttggn

SEQ ID NO: 17994 - DNA, 411 bp, Arabidopsis thaliana
  unsure at all n locations
  Clone ID: LIB35-043-Q1-E1-E3
tgttggtgttatcacagcgtttaattttccctgtgcagttcttggttggaatgcttgtattgctcttgtctgtggaaactgtgtagtctggaaaggtgctccaactacaccgttaataactatcgcaatgaccaagctantanctgaagttttagangaaaaacancttacccgggtgccatttttacggccatgtgtggtggtgctgaaattggtgaancaatagccaaagacacacgcattcccttagtaaccctttactggaancccccagngtgggctcaatggtacaacacacagttgaatgcgaaatctgggaaaaacttngcttganttgagttggaaaanantgcacccatantcatggacnangcngnatanacngttnagcgggcccnttttgtcccaatc

SEQ ID NO: 17995 - DNA, 496 bp, Arabidopsis thaliana
  unsure at all n locations
  Clone ID: LIB35-040-Q1-E1-E11
taactgtttacgcttgcccngnnccngtccaaaaantcangggtcnacccacgcgtccgtacgtgctgcgaagacgacagaagggtacggctgcganagacgacagaagggtacggctgcgagaagacgacagaagggaaaacaaaaaatggctacccgaaaagctctgatcaacgttcaccggatcattcgctccaccgccgtggttggccggagctctatcattcctgccgccgctaaccggtcatatcctattatattccggaatggagttgatttgggggcgagattcttccgtgagaacactgcgtctgcccagaatttcgatattgatctctctaacgaagagaataatagaagaacgatcaacagattgttgtataagagcaatcaaagagggtttttggaacttgatcttgttttggggaattgggttgaggagaatgttaattccatgggacgaaaatggtnttaaatccctaattcatgtcctcaa

SEQ ID NO: 17996 - DNA, 159 bp, Arabidopsis thaliana
  unsure at all n locations
  Clone ID: LIB35-040-Q1-E1-E2
cgacagaagggcacggctgcgagaagacgacagaagggtacggctgcganaagacgacagaagggcacggctgcgagaagacgacagaagggtacggctgcgagaagacgacagaagggtgttaaaaaanaaaanaaanaaanaaaaaanaaagcggcc

SEQ ID NO: 17997 - DNA, 453 bp, Arabidopsis thaliana
  unsure at all n locations
  Clone ID: LIB35-040-Q1-E1-E10
gtccacgcangcctctatactgnctcgnannagacagaagggggaaatcgaacgatttataaaatcgtcgtctggctttcgacgatctgctgacgaagaccatggcgccgattttcagannnnnnnnnnnnnnnnnnnnnnnnnnnnnnnnnnnnnnnnnnnnnnnnnnnnnnnnnnnnnnnnnnnnnnnngaggatagttacacgatcacgggtagagtgagggttccagcaagcaccgtgattggtcatgcagctaaattctcaaatatcaaagttatactcaacggtggacagcatgttactttcctcaggccggatggatactttaccttccacaaagtgccagcggggacncatctgattgaantttatgcacggggctacttcttctccccattgcaaatttgangttantgcnccggcatcntggcaaggttcaagcaacacttac

SEQ ID NO: 17998 - DNA, 415 bp, Arabidopsis thaliana
  Clone ID: LIB35-040-Q1-E1-E3
aagacgacagaagggtacggctgcgagaagacgacagaagggagctgcaggagaaatatacggtggtaaaaggcggttaaaggctttaacagatgtttttccaaatgtggtgaggaaagaaactctactcgattcttctgatttgagtttttgtaaaaaccattcttctcaaatggctgctcttgattaccttatctctcttgaaagtgatatattcgttcctacttattacggaaacatggcgaaagtcgtggaaggtcatcgcaggttcttggggttcaagaagacaattgagctaaaccggaagctgttggttaagctgatagatgaatattatgaaggattgttgagctgggaagtgttttcaaccacggttaaggcctttcacgctacacgaatgggaaggccaaagaga

SEQ ID NO: 17999 - DNA, 401 bp, Arabidopsis thaliana
  Clone ID: LIB35-040-Q1-E1-E4
cttttgtatatgtagataatagtagaacgaaaaaaaactctttgtagagagattctgcttctatatggctttctcttacgcatcattctctatacccttcaatggtttcgctgcaaatccgtctccgattacttccgcttttctcggcccatcattgagattctccaccagaacatcaaaaactcggaatccgagtaatggggtttcagtgaaatcgtcaaatagtcataggtttctagtcaaatctaaaaatttcagtgtctatgcaagggctgcagcagagaagtctgttcacgatttcactgtaaaggacatcgatggtaatgatgtttctctggacaaattcaaaggaaaacctttgttgatcgttaacgttgcgtcaagatgtggtttgacatcat

SEQ ID NO: 18000 - DNA, 382 bp, Arabidopsis thaliana
  unsure at all n locations
  Clone ID: LIB35-040-Q1-E1-E5
cacacaaaaaanaaagtcacgtgtaaatgtattatatgttctctgttttcttgtgaccaaagaggcagattttgaacctttggattttttttcggatcttgatcaaaataaanattcgttttggttttgaagcttctacaagtgtttgattagacaagaaggtgaaaatgtcggcttatacgcatccgatggagagggagctctccggtctatccanccgaggcaattccgaattggggagtcggtattcgatanaatctggatgttacatgacatctttagcancttccatcttcatagcttctctagtaacatttggagttntgatgataacacttcctantgcttancnnccatgttacaaagctgtgagaaccggaat

SEQ ID NO: 18001 - DNA, 396 bp, Arabidopsis thaliana
  unsure at all n locations
  Clone ID: LIB35-040-Q1-E1-E7
gtatcgattagagggcaaattcgctatcgataatctctctaaaaccgctaagaacgaatgtgttattagtcgtgtttttcatacacggactgatggtacgaaggagcatatgtccgttggtttacctccgctgatggattcttctccatatctaaagagtaggggacaagactctttagccgggaccacccttggtgggttgttgtctcacgttacctacttctccgaccaaacaaccgatgacaagagtcttgtggccgattttaaaactaccatgtttggttccggatcgactaactttttaccaaacataggttctctactagacttcgatcctctgtttctacaanacaattcctcagtactgaagatgttgcttgacaatgaagaaaccca

SEQ ID NO: 18002 - DNA, 400 bp, Arabidopsis thaliana
  unsure at all n locations
  Clone ID: LIB35-040-Q1-E1-F11
acnacagaagggctggttggatcatcactacctactaaatttaatccagctattgtacaaaaggttgtagatgagctttctcctagtaattttcgaattttttgggaatcacagaaatttgaaggacaaactgacaaggctgagccatgagcatatgcaagagattttggggttgctgttcaactacattcagctattacaacagactggtgtttgccagtggatttttgatgagctctcagctatttgtgagacgaaatttcattatcaagacaaaataccaccaatgtcctatatagtggatattgcatcaaacatgcagatatatccgaccaaggattggctggttggatnatcactacctactaaatttaatcccagctattgtacaaaangttgt

SEQ ID NO: 18003 - DNA, 442 bp, Arabidopsis thaliana
  unsure at all n locations
  Clone ID: LIB35-040-Q1-E1-F5
ancctctaaacatgacgtcntactaacgcgtccgcccacgcgtccgcggacgcgtccgcccacgcgtccgtacggctgcgagaagacgacagaaggggggggtcgcagtgaccaggcccgggcgactgtttaccaaaaacacaggtctccgcaaagtcgtaagaccatgtatgggggctgacgcctgcccagtgccggaaggttaaggaagttggtgacctgatgacaggggagccggcgaccgaagccccggtgaacggcggccgtaacgataacggtcctaaggtagcgaaattccttgtcgggtaagttccgacccgcacgaaaggcgtaacgatctgggcactgtctcggagagaggctcggtgaaatagacatgtctgtgaagatgcagtgtcaatacaaagangagagaancattgatagatgatgttatcngatg

SEQ ID NO: 18004 - DNA, 288 bp, Arabidopsis thaliana
  unsure at all n locations
  Clone ID: LIB35-040-Q1-E1-F9
gtccacncacgcgtccgcccacgcgtccgtanggctgcgagaagacgacagaagggtacggctgcgagaagacgacagaagggtattccannnnnnnnnnnnnnnnnnnnnnnnnnnnnnnnnnnnnnnnnnnnnnnnnnnnnnnnnnnnnnnnnnnnnnnnnnnnnnnnnnnnnnnnnnnnnnnnnnnnnnnnnnnnnnnnnnnnnnnnnncgttagtcnnnnnnnnnnnnnnnnnnnnnnnnnnnnnnnnnnnnnnnnnnnnnnnnnnnnnnnnnnnnnngcggcc

SEQ ID NO: 18005 - DNA, 435 bp, Arabidopsis thaliana
  unsure at all n locations
  Clone ID: LIB35-040-Q1-E1-G1
gcgtccganggctgcnanaagacgacagaagggggagaacaattacttccaacggagaatggcctcaattgtcggaattcgaacaagattcctgagtttcgggaagctttcacaaatctcttcttcactgttgagaatacacaatcctcgtaatcatcagaatcctcttattctccctcttccttgtttctctgccgctcctagtcgtcatcgtcctctgatttggcttcgctcatctccgcctgtgtcctcgatgaccactcaggctgaatctgggtcttcccagcaatccgattcttccaaaacggtgagagtggtgataaagggaagagtacaaggagtgtgctacagaaactggactgttgagaacgctgagcagctggggataaagggatgggttaggaaccgcanggatggttcattgaancatccttt

SEQ ID NO: 18006 - DNA, 492 bp, Arabidopsis thaliana
  unsure at all n locations
  Clone ID: LIB35-040-Q1-E1-G3
ctgttttcctgccgcnaccggtccgaaaaatcccggggtcgacccacgcgtccgtacggctgcgatgaagacgacagaaggggaagaaaaaaaaccaaaaaaaaagagagaggtgaaattgattttctgctcgcgatcgtcatttcaatttctaattagctttcctggtgtttcttctccggcgtaatcatgacaacctcaaaaagactagcagacaggaagattgagaaattcgacaaaaacattttaaagagaggatttgttcctgagaccaccaccaagaagggcaaggattatcccgttggtcccatccttcttggcttctttgtctttgttgtcattggatcatctctctttcagatnattaggactgcaactagcggaggcatggcataaaccaaaacacagtcaagctagaagaagcagtttcaaaatgtagaatcctctctgtctccttccttttccccccttatactggtanaatgtgtcaac

SEQ ID NO: 18007 - DNA, 415 bp, Arabidopsis thaliana
  unsure at all n locations
  Clone ID: LIB35-040-Q1-E1-G7
ttgttttcgggggcatttcctgctacaacggcaatccgccaagtatcatgtgggacagctcatgttgtggccttatcagaggaaggccttcttcaagcttggggctataatgaacaaggccaacttggtagaggagtcacttgtgaaggactacaagcacctcgtgtgataaatgcttatgcgaagttccttgatgaagcacccgagcttgtgaagattatgcaactttcatgtggagaataccatactgctgctctttctgatgcaggcgaggtttacacttggggattaggaagcatgggtcaacttgggcatgttactcttcaatccggggataaggagttaataccaagganaatcnttggtcccnatggtgtgtccatgaaanaanttncctggtggtggtgtacacact

SEQ ID NO: 18008 - DNA, 414 bp, Arabidopsis thaliana
  unsure at all n locations
  Clone ID: LIB35-040-Q1-E1-G8
agaagacgacagaagggggaaacgaaacgaactatggatttgaagaaagcatctttgtttttattccttcttctctgtctccacctgcaactgcaacaccactttgctcacgcggtctcgcgatcttcaacaagtttagccttcgttgatccaaaccatgatgatctcccgtttcaagaagtagaattgaagccagacggtgacgtaatcgaagccaatttaccgaaattaacagtcgttgttaagaannnnnnnnnnnnnnnnnnnnnnnnnnnnnnnnnnnnnnnnnnnnnnnnnnnnnnnnnnnnnnnnnnnnngagttctagcagaggcggtggaggaagttctagcagaggcggangaaggagttctagcanaggaagaagattacntccgattccgaattatggcngt

SEQ ID NO: 18009 - DNA, 458 bp, Arabidopsis thaliana
  unsure at all n locations
  Clone ID: LIB35-040-Q1-E1-G9
gtccacncacgcgtccgcaacacgcgtccgtacggctgcgagaaaacgacagaaggggagaagaagaaatagaaatgagagctctcttgtgctcacaccgtttactaccattatcatctctcnnnnnnnnnnnnnnnnnnnnnnnnnnnnnnnnnnnnnnnnnnnnnnnnnnnnnnnnnnnnnnnnnnnnnnnnnnnnnnnnnnnnnnnnnnnnnnnnnnnnnnnnnnncttctagaacctctgaaaaacccggccggccagacccggacccggaagacgatcccccgataccccaagaaantgttcgagaaggataatggggaaggattgtggtttctgtggaaaaacaactgggcttggaattggcnttttgaanttacncaannttttgaaggatanaaacttctaggacttgcctttgtgggttccaaaacttgaccanactcgtgacctttgg

SEQ ID NO: 18010 - DNA, 418 bp, Arabidopsis thaliana
  unsure at all n locations
  Clone ID: LIB35-040-Q1-E1-H2
aagacgacagaagggtacggctgcgagaagacgacagaanggtacggctgcgagaagacgacagaagggtacggctgcgagaagacgacagaagggtacngctgcgagaagacgacagaanggggacataaaaatggcgacttcgatgattcacagattgttcaaacaaggcacaaagatcgtcggcgttggactcaattacgcttctcacgccaaagaacttggcaatgccctcccaaaggacccgattgtgttcttaaagccaacttcgtcgtacctgnaaaacggtggaacaatagagatcccacatccactggattcacttcaccatgatgtggnacttgctntactaattgggcacaanngcangagatgtcccanaancnttagccctnaantacattgggccgntatgccc

SEQ ID NO: 18011 - DNA, 349 bp, Arabidopsis thaliana
  unsure at all n locations
  Clone ID: LIB35-039-Q1-E1-H11
aaggcaaatttctcaaaggaagcgaagccctagcgtcctctctctgtcttctcgtttctgcgccgattcgtagtctgttgtgcgcttgcctctcctcttttggattagcatacctctcactcgcatcaggtaagaagtttggttcagatttagtgaatctcattgctttagtttcaaagcttattaactctctgtgtttttgcgttggttantacgttggaatacttaacccttataacaactactggaattttgccgaaacatagttagtcnctatgctttgtttgggattgaattgattatgatggaatgcaacataagttatcgctgtgccttgtttggatggaat

SEQ ID NO: 18012 - DNA, 400 bp, Arabidopsis thaliana
  unsure at all n locations
  Clone ID: LIB35-039-Q1-E1-H5
ccctgaaacctctcttcagaaaactcaggcaccattttctccttccgccgccgccatggaatcacttccccagccgcaaaaccaatcatctccggcaacaactccggcgaagatcctccttgggaaatacgaactcggtcgtcgtctcggtagcggaagcttcgcgaaagtccatttagctcgatcaatcgaatccgacgagctcgtcgccgttaaaatcatcgagaagaagaaaacaatcnaatccggtatggaaccaagaataatcagngagatcgatgcgatgcgtctcttcgtcatcatccanacatactcaangatccatgaagttatgngcaanccanatctaagatttatctccgtaatggnaactcgccntccggtggtgaacttttctcan

SEQ ID NO: 18013 - DNA, 362 bp, Arabidopsis thaliana
  unsure at all n locations
  Clone ID: LIB35-039-Q1-E1-H7
attaaattcgatttttgagacaaagctcgacaagtcgtcggcggcggtgtaaaaatagtcggagctatggcgatgcaggccggagttggcttatccaggatctttctcttagccggagcaggttacactggtacgatcatgatgaagaatggaaaattgtcggatttgttgggtgaattgcagagtttggtgaagggaatggagaaatctggagaagggtctgagggagattctgatgtttctgatgctatagctgcacangttcgccggttggctatggagattcgacagctagcttcgcagcaacacataacggtcatgaatgganttccngggcaaacctaaaaacccttgctgttcct

SEQ ID NO: 18014 - DNA, 345 bp, Arabidopsis thaliana
  unsure at all n locations
  Clone ID: LIB35-039-Q1-E1-H10
ttttgcaagaactatttccggaacctggaaggcttcaatttatttatgctgatcttggagatgccaaagctgtcaacaagatattcacagagaatgcctttgacgctgtgatgcatttcgctgctgttgcatatgttggggaaagcacacaattccctcttaagtattatcacaatattacatcgaacactttggtagtattagagacaatggctgctcatggagtaaagactttgatatattcaagcacttgtgcaacgtatggggagcctgatattatgccaattacagaggaaactcctcangtgccaatcaacccatatggtaaggccaagaagatggcag

SEQ ID NO: 18015 - DNA, 258 bp, Arabidopsis thaliana
  unsure at all n locations
  Clone ID: LIB35-040-Q1-E1-A1
cgacaggagggtacggctgcganaagacgacagaaggatacggctgcgagaagacgacagaagggtacggctgcgcgaagacnacagaagggtacggctgcgagaagacgacagaagggatggcatgagctttttgttatttgtttctaatatttggactactatgtgttgtgtgtatatgattcataattaatactatatttatggattgatttctttctataaaaaaacannccncantncaaaaaaaaagcggcc

SEQ ID NO: 18016 - DNA, 473 bp, Arabidopsis thaliana
  unsure at all n locations
  Clone ID: LIB35-040-Q1-E1-A11
gngctcgtccaaaactcaagggtccacncacgcctccntnggctgncataanacgacagaagggggaacttaaacagatatttcataaggaaaatgaagggtgagtttttcacattgatggcaataatgtctctcctcttagccttctcgttagtccatggaggaggagagtctggaacaccttctaatgcagccgctaccccgactagcccaaccgaaggatccagtggttcaagtggttcagctcatggacctaattgnnnnnnnnnnnnnnnnnnnnnnnnnnnnnnnnnnnnnnnnnnnnnnnnnnnnnnnnnnnnnnnnnnnnnnnnnnnnnnnnnnnnnnnnnnnnnnnnnnnnnnnnnnnnnnnnnngtcaggttcaggaactggatttgggtctggctcgggangaagaagaaccacagacggtggttctggccatggaaattggaccggacacnctggttaaag

SEQ ID NO: 18017 - DNA, 412 bp, Arabidopsis thaliana
  unsure at all n locations
  Clone ID: LIB35-040-Q1-E1-A7
atcacaaacacaaatgagccacaaaaacgaagacatcatatcaagaaacgacgatgagcttcactgcttctctcgtctcttatttgacgtctccctcactcgtctcgctcaaccatcttcctccttccttcttcctcccaaccaaacttgtcaagccaacaagcctcactcattcacagcctccgagattgtccgcatcctatggtccagctgcaaaagctgctactgccaacgacgttgttccagaaacagctccgacatcagcgtcggaggtcgtctccagcttctacgccgccgttaacgtccatgatttatcctctgtcacagacctcatcgctcaggactgcgtctacgaggatttcgtcntctcatctccctttgttgggccgaaangcaattcctgattcttcgg

SEQ ID NO: 18018 - DNA, 400 bp, Arabidopsis thaliana
  Clone ID: LIB35-040-Q1-E1-A9
acgaagaagattctccttctctccgtcagacaaatctacgaacaagcgagcctgagcttaagaccaaactcatagagatgggtttcttctcttttcttggaagagttctcttcgcttctctctttatcctctccgcttggcaaatgttcaatgatggtggtcctgcagctaaagaattggctccaaagcttgatttggttaaggcacatttatcttctagattaggagtaacattgcccaaaatagaggtgagacaagtcgttgctactattattgccctgaaaggagtcggaggcttactctttgttatcggaaacaccttcggtgcttatcttccggcttcctacttggtggttttcggtcctaatctctaagaattctacaactacgggcctcaaga

SEQ ID NO: 18019 - DNA, 461 bp, Arabidopsis thaliana
  unsure at all n locations
  Clone ID: LIB35-040-Q1-E1-B9
caaagggtccacgcacncctcnntactgntncgaganaacgacagaaggggataaaaaaaagtagaacaagcaacacaacgcagctaagaaacctccttaaagaacaaagaaaaaacttggtgaaatcgattctcttcaaagatcgtcttcctaatcactttcaacaactcgatcaatccttactgagacgatgccgaagaacaaaggaaagggaggaaagaacaggaagagaggaaagaacgaagctgatgacgaaaagcgagagcttatattcaaagaagatggacaagaatacgcacaagttcttcgtatgctcggtaacggttgatgcgacgttatgtgcattgacggtgttaagcgtctttgccatatccgtggtaagatgcataagaaggtttggattgctgctggtgacatcatacttgttggtcnaagagattaccaagatgataaagctgat

SEQ ID NO: 18020 - DNA, 420 bp, Arabidopsis thaliana
  unsure at all n locations
  Clone ID: LIB35-040-Q1-E1-C6
ctatactgattcgnaataacnacagaagggggccgggaggaatgaaccggttgaaggagcaaaaggggccgaagttcgacggcgaagaatcacctccacctgattttgatgaagatcgaagtgtgggtgaggtagacggaggagatcacacgccattcgctggaggtaaagtcagaaggaaagcgtctcgctatagagagcatcgtggtgactatcttcacgtttcttctcgtcctggattgatgcgaattctggagaaacaaggtgatacatcgattctttttgctgataaagttttgaagttcaccggctcggggaagatgaaacggcgtatttttatcctcactgattttgcgatctatctaattgatcccgagactgaagctatgaccaggagaattgctttgtcatcagtanaga

SEQ ID NO: 18021 - DNA, 412 bp, Arabidopsis thaliana
  unsure at all n locations
  Clone ID: LIB35-040-Q1-E1-C8
atgttaaagcctatttacgaagaggaaccgcaagagaaatgttaggcgattgcaagggagccatagaagattccagatacgcacttgtgctggaaccaaacancaaacgagcgtctctctcagcagagagactgagaaaattccagtgagcttcttttgtccgtacctcaccgatcattgagaaaacgtttgttccttagaatttgtccaagagtataggccaattttgtcaacacttgtcttttgcgtctgatatttaggcattttatctagagataccttttgcaagtccgccgagaatgggaanattataatatccgatgtttattttaaacgttctctaaaattggatatcaaanagtaatgttaatcttaaacaccgggataccggcnttcccggtcgaaaaaaaaa

SEQ ID NO: 18022 - DNA, 138 bp, Arabidopsis thaliana
  unsure at all n locations
  Clone ID: LIB35-040-Q1-E1-C9
cgacagaaggatacggctgcgagaagacgacagaaggatacggctgcgagaagacgacagaaggatacggctgcgagaagacgacagaagggaggattnnnnnnnnnnnnnnnnnnnnnnnnnnnnnnnnnnngcggc

SEQ ID NO: 18023 - DNA, 396 bp, Arabidopsis thaliana
  unsure at all n locations
  Clone ID: LIB35-040-Q1-E1-D1
aagacgcagaaggggcggtcgtcgccatgagaatctatccgtcgtttcgtcctcacaaccgtctctgatgccaaagcagagatggctttatattcccgagacgaggttgaaaagagaggttttaaagctcgatgtcgtcggaagagctgctgattccacgagctcttctccatcagtagcttccggtgatagaaccttaattcctgatgatgaattcactttagccaagatttcatttggtgttattgggctaggtctcggggtttcgctactctcgtatggttttggggcctattttactatccttcctggaactgagtggtctgctataatgctaacatatggatttcccctttctattatcggaatggctcttaagtacgcagaactcaaanc

SEQ ID NO: 18024 - DNA, 413 bp, Arabidopsis thaliana
  unsure at all n locations
  Clone ID: LIB35-040-Q1-E1-D2
tacggctgcgagaagacgacagaagggtacggctgcgagaagacgacagaagggtacggctgcgagaagacgacagaagggttacggctgcgagaagacgacagaagggtacggctgcgagaagacgacagaagggagaagtgaacaagatcattggaagccgaacggcgggggaaggagccatggagtaccttatcgagtggaaggacggccattctccgtcgtgggttccatcgagctacatcgcancagacgtggtgtcggagtacgagacaccctggtggacggcagctagaaaagccgacgagcangccctgtcacagctcctggaggaccgagactcgatgccgtggacgaaaacggccggacggctctgctttcgtggcaagtctggggtccgacaanttcctaag

SEQ ID NO: 18025 - DNA, 420 bp, Arabidopsis thaliana
  Clone ID: LIB35-040-Q1-E1-D4
agaagggggcagatagttcgtcgaggaggaaccttaaacgatccttcttagaagatgaagattccgataaacaacctcccgaaaagcgagtacggtttccaaaggggaagaagtcgaaacctgaacagctcttagaggaagaagctttagcccgccgcaaagcccgtgatgctgctaaggagcgtgcaaagattcgcaatcagaatactactaagctctttatcgaagatgacagtgatgatattaatcaggctcaggagacttatgaggatgatggcaatcgcacagaagatgggatccagattgaagcttttagtctggacagagagaaagaagaagttactttgatgctgatgggaactttgtagaatatgttagagaaaaggaagtcaaggatgcatggcttgacagtattgaaaa

SEQ ID NO: 18026 - DNA, 365 bp, Arabidopsis thaliana
  unsure at all n locations
  Clone ID: LIB35-040-Q1-E1-D5
cgacagaagagtacggctgcgagaagacgacagaagagtacggctgcgagaagacgacagaagagtacggctgcgagaagacgacagaagagtacggctgcgagaagacgacagaagagtacggctgcgagaagacgacagaagggtacggctgcgagaagacgacagaaggggctagttttttgctctctcgaagttccgtgcgactctctgctcgagcaagatctcctaccgatacaatgattatctcanaggctaaccgcaaagaaatctgcaagtacctcttcaaaagaaggagtttgctttgcgaagaaggatttcaatcttgctangcatcccgttgatcgatgtccccaacctncaag

SEQ ID NO: 18027 - DNA, 425 bp, Arabidopsis thaliana
  unsure at all n locations
  Clone ID: LIB35-040-Q1-E1-D7
nagacagaaggggacaccgagaaaggcaatggagtcggctaaatcaatcatcggtggccaccaaaatgtcatcctgatgcgtcatggtgatcgactcgacaatttcgagccactctggacttcaacagctgcgagaccgtgggatccatcgcttgctcaagacggtaaggatcgggcctttagaactggtcagagaatccggtctcaacttggggttccgattcaccgtgtcttcgtctcccctttcctccgctgcatccagaccgcttccgaagtcgttgccgccctctcagccgtcgatttcgatcccattgctatgtcatctaaagacgtgctttccatcgacaatactaagatcaaggtggctattgaatttggattgtccgagataccgcacccaatctttattaacaattgaagttgct

SEQ ID NO: 18028 - DNA, 180 bp, Arabidopsis thaliana
  unsure at all n locations
  Clone ID: LIB35-040-Q1-E1-D9
ctgcgagaagacgacagaaggatacggctgcgagaagacgacagaagggtacggctgcgagaagacgacagaaggatacggctgcgagaagacgacagaagggtacggctgcgagaagacgacagaaggggnnnnnnnnnnnnnnnnnnnnnnnnnnnnnnnnnnnnnnnnnnngcggcc

SEQ ID NO: 18029 - DNA, 482 bp, Arabidopsis thaliana
  unsure at all n locations
  Clone ID: LIB35-039-Q1-E1-A7
cttacaggttccgnacaggtcaccaaattcncgggtccacncacgcgtccgaacangcgtccgtanggctgcgagangacganagaaggggacaggagtcgagagagaanttagccatggcgaccagagctttgctcgccgttatatatgcgtctccgaatcgctgctacatctctccgagcaggatcaaaatccaatctttaacttgttcttcttcaagtcattattaccaaagacagagtagaaaaaaccacagaatagctcgaagttactcgtctgactcggattcctccgttcttcagccgccggatgtggcccgtcttgctcagacagctcgaatctctctaactccggcggagatagaggaatgtnaaactaaaattcgtcgagtcatcgactggtttgggcagcttcaacaagttgatgttaacagtgtggagccagctattagagcagaaatggatggtggaaatttgcgaana

SEQ ID NO: 18030 - DNA, 384 bp, Arabidopsis thaliana
  unsure at all n locations
  Clone ID: LIB35-039-Q1-E1-B4
gggagagaaagcaaaaatggcactaagaatgtgggcttcttctacagcanacgctctcaagctttcttcttctgtttccaagtctcatctctctcctttctccttcnctanatgcttctccacagttttggagggtttgaagtatncanattcacatgagtgggttaaacatgaaggctctgttgccaccattggnatcactgcccatgctcangaccatttaggtgaagtngtntttgttgaactgccagaggacaagacttcagtgntcaaacgacaanagctttggagcantggacagtgcnatggcaacaanttagatcttatcaccaatctcaggtgaaaatcattgangttaacaatgaanctcacacaatcacctgt

SEQ ID NO: 18031 - DNA, 386 bp, Arabidopsis thaliana
  unsure at all n locations
  Clone ID: LIB35-039-Q1-E1-B8
agagatcgagagaagaatagtttgatcatcttgtgagaaaantaatggctgcttcagtgatgctatcttcggtgacattganaccanctggtttcacggtggacaagacngcggctagaggattaccgtcgctcacaagagctcgtccctccttcannattgtcgccagtggcgtcaagaagatcaagaccgacaagcccttcggaattaacggnagcatggacttganggacngcntctacncctccggcagaaagggcaagggataccgtgtttacaagtacgtcgacaagtatggatctaacgtcgatggatacagtcctatttncaacgagaacgaatggtcagccantggtgacgtntacaagggaagaatcaccggnttg

SEQ ID NO: 18032 - DNA, 334 bp, Arabidopsis thaliana
  unsure at all n locations
  Clone ID: LIB35-039-Q1-E1-A6
ggtcgcagtgaccaggcccgggcgactgtttaccaaaaacacaggtctccgcaaagtcgtaagaccatgtatgggggctgacgcctgcccagtgccggaaggttaaggaagttggtgacctgatgacaggggagccggcgaccgaagccccggtgaacggcggccgtaacaataacggtcctaaggtagcgaaattccttgtcgggtaagttccgacccgcacgaaaggcgtaacgatctgggcactgtctcggaganaagctcggtgaaatagacatgtctgtnaagatgcggactacctgcacctggacagaaagaccctatgaagcntcac

SEQ ID NO: 18033 - DNA, 444 bp, Arabidopsis thaliana
  unsure at all n locations
  Clone ID: LIB35-039-Q1-E1-B9
ccaagcctcnatactgagtcatnanaacagaaggggggatgaatctaaagcaattgtcagatttcagcatctcccatggaggaatcaagattcgattctgaagatgttgattatgctgagattgttgttgttcgtcatggtgaaacatcttgggatgccganagaaaaatccagggtcatttggatgttgagttaaatgatgcaggaagacagcaagcacangagagttgcanagcggttatcgaangagcanaagatatctcatgtatactcttctgacttgaanagagcctttgagactgctcagatcattgctgctaaatgcngcangcttgacgtgcttaccgatctgatttgcgggaaanacatttagggagattgcaaaggacttgtgtatcaagaagcttcaaaaattcgnccggaaccttacaangcttttcatct

SEQ ID NO: 18034 - DNA, 458 bp, Arabidopsis thaliana
  unsure at all n locations
  Clone ID: LIB35-039-Q1-E1-C11
aacgcgggtcnacccaagcctcnntactgnttcgaaanaacgacagaggggaaccaaaaaaaaaacacctccgatctcggcgagagaaagagaaacgatctgtgagagagaatggatcagatcttgaacaaggtaggctcgtactggttaggtaagaaggtgaacaagcagctcgattccgtcggtgacgatatcaactctttgtcttcgagcatcgaaggaggaacaaaatggttggtgaacaaaatcaaaggaaaaatgcagaagccattgcccgagttactaaaggagtttggtttgcctgtggggatctttccacgtgatgcaaccaactacgagttcaatgaacagacgaggaagttaactgtctttattccatcaatctgcgaagttggttacaaagatacatcagtcttgagattcaccactacagttaccggatttctcgagaagggaaa

SEQ ID NO: 18035 - DNA, 408 bp, Arabidopsis thaliana
  Clone ID: LIB35-039-Q1-E1-C12
caaaaaaaaaacacctccgatctcggcgagagaaagagaaacgatctgtgagagagaatggatcagatcttgaacaaggtaggctcgtactggttaggtaagaaggtgaacaagcagctcgattccgtcggtgacgatatcaactctttgtcttcgagcatcgaaggaggaacaaaatggttggtgaacaaaatcaaaggaaaaatgcagaagccattgcccgagttactaaaggagtttggtttgcctgtggggatctttccacgtgatgcaaccaactacgagttcaatgaacagacgaggaagttaactgtctttattccatcaatctgcgaagttggttacaaagatacatcagtcttgagattcaccactacagttaccggatttctcgagaagggaaagcta

SEQ ID NO: 18036 - DNA, 443 bp, Arabidopsis thaliana
  unsure at all n locations
  Clone ID: LIB35-039-Q1-E1-C4
caancctctaaagtcactcgtgcttaacgcgtccgcccacgcgtccggacgacagaaggggacttcatcgctcttttatcgttaataatcataaagaaaatcaaagactcgaaccgaaatcttcctccgagcccactgaagctaccggttatcggaaacctataccagcttcgaggattgtttcacaaatgtcttcacgatctctccaagaaacacggacccgtgttgcttctccgtctaggttttctctatatgtttgtgatctcatcgaccgaagcaagctgacgaagctcttaaagtacatgaccttgagtgttgttccagacctataactaancgtcncancanaactctggcgtgacggtcaagatatcggcctanncccatatggtgagtcccttgagagagtttgccgggaagcnttccttttctcaangtttttc

SEQ ID NO: 18037 - DNA, 374 bp, Arabidopsis thaliana
  unsure at all n locations
  Clone ID: LIB35-039-Q1-E1-C6
ctcactttgttcatctaaaaactcctcctttcatttccaaacaaaaacttctttttattctcacatcttaaagatctctctcatggcgatgtctttctcaggagctgttctcactggtatggcttcttctttccacagcggagccaagcagagcagcttcggcgctgtcagagtcggccagaaaactcagttcgtcgtcgtttctcaacgcaagaagtcgttgatctacgccgctaaaggtgacggcaacatcctcgatgacctcaacgaggccacaaagaaagcttcagatttcgtgacgggataaaacnaaagangcatttancagatgggtgaagaaagccgaaagactacgttggttgaaaaaaaacagt

SEQ ID NO: 18038 - DNA, 411 bp, Arabidopsis thaliana
  unsure at all n locations
  Clone ID: LIB35-039-Q1-E1-E1
ccttaatccattcttgtggtcactttttcgtccttaacccatctagaacagattttgattctaaagtcttgtgaatcggcagcggaagaagagtgaattgttcatccttatcttgccatggctatgtatattcgtgtgaagcgcatgaaaactacttactttatccaatgtgatccaacagagactgttttggntgttaagcaaaaactgtttgctctcattgagcaaccagttaacaatcagcgtctggtcttaatgtctaccgnanaagtattagaggattcganatccttagcagatcanaaggttgagaatgatgcagttgtggctttgactttgaagaaagatgataacgagtttgangatgtcaacattgcacaagcccaacgacttctcactttcaatgaagag

SEQ ID NO: 18039 - DNA, 460 bp, Arabidopsis thaliana
  unsure at all n locations
  Clone ID: LIB35-039-Q1-E1-E2
ttagctgccggcncaggtttnanacgcccgggtcnacgcaaacctcnntgccnaatcanganagaaagggcaggagagccatttggatagactaaacgttcctgtgagctggctggggttaacaaaacttgtgagttggttctacnctgatgagttgccaaagcctccatcgggttgcaagtggaacaacatggacactgaggcaaagctggatgagcttcaagcttatgtggagatatactcgctttctgaatggtggattatggaagaacttcaaaacgattgcgctcatgtgattctctcttgcttggaatccgctagagagttatctatcanaacaatcgaattagctgcgagtttctcgatgtgggaaactggtggaagctgctgcctaatcatgcagctcccatttatcatcagcttcgttgactcanggtgagctcgatgangctagacgacg

SEQ ID NO: 18040 - DNA, 421 bp, Arabidopsis thaliana
  unsure at all n locations
  Clone ID: LIB35-039-Q1-E1-E4
taacgacagaaggggacagaaacaaacataagccaatggaaacaaaaaaattctaaggtgaaaaaagccaatcaggaagctgagtaaactctaagctcacacaaaaatggcgtctcttcttggaacatcttcttctgcaatctgggcttctccttcactctcttctccttcctcanaaccttcctcctcccccatttgcttcaggccaggaaaattgtttggaagcaagttaaatgcangaatccaaataaggccaaagangaacaggtctcgttaccatgtttcggttatgaatgtagccactganatcaactctactgancacgtactanggaagtttgantcacagangantngcgaagaccggttnanccntttgcnnctatagtanggcnngatgagatgaaattatgtcntttgt

SEQ ID NO: 18041 - DNA, 487 bp, Arabidopsis thaliana
  unsure at all n locations
  Clone ID: LIB35-039-Q1-E1-E9
aagttcnattcagntcgccacannnccacnnatcnngggtccacccaagcctctatactgattcgaaanaacgacagaaggggggggaaaaattggactattcggtggggctggcgtgggtaaaacagtactaattatggaattgatcaacaacattgctaaagctcatggtggtgtatccgtatttggtggagtaggcgaacggactcgtgaaggaaatgatctttacatggaaatgaaagaatctggagtcattaatgaacaaaatcttgcggaatccaaagtggccctagtttatggtcagatgaatgaaccgccaggagctcgtatgagagttggtctgactgccttaactatggcagaatatttccgagatgttaatgagcaagacgtacttctatttatcgacaatatcttccgtttcgtacaagcaggatncgaggtatccgccttattgggtaaaatgccttctgctgtgggttatcaa

SEQ ID NO: 18042 - DNA, 490 bp, Arabidopsis thaliana
  unsure at all n locations
  Clone ID: LIB35-039-Q1-E1-F1
aacgttacgcctgccngtanngngtcttaaaagncccgggtcgacccaaancgtccgtggcgctgcnagcgacaaaaggggacggaagaatcagatcaacgcatgcgaccaagtaaatcaanatcgggttgangaanaaagagataagctttcacatcaatttttgaaggcgcnaaatggggaatacttcatcgatgctgactcagtacgacatcgaagaagttcagagtcattgtcatgatctatttgagcagcaggagattttatctctgtatcaacggttttgccagttagatcgaaacgcaaaaggntttatatctgctgatgagtttctctctgtgcctgagtttgcgatgaatccactctctcagaggctgcttaagatggttgatggtttgaactttaaggattttgttgctttcttgtctgcgtttagtgccaatgctagtctaagacnagaaagttcaatttgatcttaaagtcnatgatt

SEQ ID NO: 18043 - DNA, 75 bp, Arabidopsis thaliana
  unsure at all n locations
  Clone ID: LIB35-039-Q1-E1-G11
actnagtcataatacgacagaagggttcatcgcacctttttaaaatatataaaaatacgaatgtgtgttgattga

SEQ ID NO: 18044 - DNA, 475 bp, Arabidopsis thaliana
  unsure at all n locations
  Clone ID: LIB35-039-Q1-E1-G6
aacttttnaaccgccccgtaccngtccaaaaattcccgggtcnacccacgcgtccgnccacgcgtccgtacggctgcgagaaacgacagaaggggaggagagacaaagaaggatgagtatgttgtcagggaaagctgcttacgatctctttgtctatggcagtctccaggaacccgaagtcgtatacgtgcttcttaatcgcgtccctgaccatgtctccgccgtactctccggctttcacaggtttagactcaaaggccgtgtctatccaacaattctaccggacggtaccggaaaagtcaacggaaaggtgctaaagggcataacagatgatgaactgaagatgttagatgagtttgaagatgttgaatatgacagaaagactgttgaagtaatgctgacggatacttcagagaagctgcaagtcgaaacatatgtntggaagaacaaagatgattcggatcnttatggagaa

SEQ ID NO: 18045 - DNA, 448 bp, Arabidopsis thaliana
  unsure at all n locations
  Clone ID: LIB35-036-Q1-E2-C9
gcgtccgtacggctgcgagaagacgacagaaggggaacaacgaaatggacgatttctcaatccctatgaaatctaacggtaacttagatgttccaccaccagcaccagctaacttcatccgtcctggaaaacgacctttgtcctctatgtcacccaccattgtactcaaggacggtaaagtgaaagccgctgtgggtgcgagcggaggagccaacattattgccgggacaacggaagtttacttgaatcattttttcctcaagatggatcctctttcttccgtcttagctccaagaatctaccatcagctgataccaaacagagcttcgtacgagaactggacaacagtattcaatgatcatttcgagattcctaaagcaacaagagttgtgttggagaagaaaggtcatgtcctatctcctattgccggagggacnatgctcaattc

SEQ ID NO: 18046 - DNA, 415 bp, Arabidopsis thaliana
  unsure at all n locations
  Clone ID: LIB35-036-Q1-E2-C5
aagacgacagaagggtacggctgcgagaagacgacagaagggtgccgaaaagagagagagaaaacaaatcaagnaatggctacccgaaaagctctgatcaacgttcaccggatcattcgctccaccgccgtggttggccggagctctatcattcctgccgccgctaaccggtcatatcctattatattccggaatgganttgatttgggggcganattcttctgtgagaacactgcgtctgcncaaaatttcgatattgatctctctaacgaanagaataagagaagaacgatcaacagattgttgtataggatcaagcaaananggtttttgggaacntgatcatgttttgnggaattgggttgacgagaatgtnaattccatggacganaatggtgtttaatcctaantcatg

SEQ ID NO: 18047 - DNA, 425 bp, Arabidopsis thaliana
  unsure at all n locations
  Clone ID: LIB35-036-Q1-E2-D11
agaaggggacggctganagaaagtaaagagaaaaaccctaatcttcatcttcatcttctcccgccgtcggccgtaagaggtttcgaagaagcaaagtgagcaacantggcgggaggcaagatcaggaaggagaagcccaaggcttcgantagagcaccatcgaaccattancanggangaatatcgttccacaantcgaaagggcagcatanccttaanaaccctctgcttgtggattcgatcgttcagaaagctggtatcaanagtaccgatgtgattctcgagatcggtcccggtactggaaacttgaccaagaagcttctagaagctggcanagaanttatcgccgtcgaacttgactctcgtatggttctcgagcttcagcgccgttttcaagggaactcccttctctaaccgcttgaagg

SEQ ID NO: 18048 - DNA, 398 bp, Arabidopsis thaliana
  unsure at all n locations
  Clone ID: LIB35-036-Q1-E2-D5
aagacgacagaaggggaacatcaaaaactaacacagaaagaaaaaaaacagttcctgttctattagattgttttctaaattgtctgaaaatcatggnagtaacttcccaatctaccctccctccagggttcagatttcatcctaccgacgaagaactcatcgtttactatcttcgaaaccagaccatgtctaaaccatgccctgtctccatcatcccagaagttgatatcctacaaattcgacccatgggcaattacccgagaaaacagagtttgggagaaattgattggnattccttnagcccnaantgaaaggaaatttnccaatngggnttcagnccaanccggggnagttgtttccggttattggaaaccaaccgggtacagacaaanccattc

SEQ ID NO: 18049 - DNA, 210 bp, Arabidopsis thaliana
  unsure at all n locations
  Clone ID: LIB35-036-Q1-E2-D8
acgcgccctgtagcggcgcattaagcgcggcgggtgtggtgggttacgcgcaagcgttgancggctaacaacttgccaacggcctaacggcccggctcccttncgcttccttcccttccttcctccgccaacgtttcgccgggcttttccccgtcaaagctccaaaatccggggggctcccctttaangggttccgaatttantggcttt

SEQ ID NO: 18050 - DNA, 404 bp, Arabidopsis thaliana
  unsure at all n locations
  Clone ID: LIB35-036-Q1-E2-E8
ggctgcgagaagacgacagaagggtacggctgcgagaagacgacagaagggtacggctgcgagaagacgacagaaggggagcggcggtgagattagagaagaagggtttgtgaaatggagtccagtgaggatgtggagaatctgagtagagctattgagaagcttcttcatgagaagaggaagagagaagcttctggtgacgccttcattgaagacgctgatgatcagcttttcctctctagccttatctctcagttgnnnnnnnnnnnnnnnnnnnnnnnnnnnnnnnnnnnnnnnnnnnnnnnnnnnnnnnnnnnnnnnnnnnnnnnnnnttcttcaccatccanaggaaaaagcnanggccatagacattgggaagaaatntanaaagaaattacttaata

SEQ ID NO: 18051 - DNA, 449 bp, Arabidopsis thaliana
  unsure at all n locations
  Clone ID: LIB35-036-Q1-E2-E9
gcgtccgtacggctgcgagaagacgacagaagggggaagaagaagatcaaaaccatgacgagtcaccacgcgatcgaagtgacgaagacggtgctggaagtagccgacgtagcatggaccgcggtggaaacttnnnnnnnnnnnnnnnnnnnnnnnnnnnnnnnnnnnnngtcaacgaatccaatttctgatccacgagatcgtgaattagaagctcttcgtcaagagaatcgtcgtctcaggactttgcttgaatcgaatcttaaactctttgagactctcgctgaatctgctgcgttctctcatgattgccctagcgacctctatgctaggcttgtaacgatggttacttcaagagatttcttggctagattagagaatctaagacaagctttatctaatggaactcagaatcaatttcattcaaggaaccancagaagatgatgtg

SEQ ID NO: 18052 - DNA, 380 bp, Arabidopsis thaliana
  unsure at all n locations
  Clone ID: LIB35-036-Q1-E2-F10
tcgttcattatgaccctaaagccattggggttgacgccaagaaggcttttctattcanaaacatgcatttctacgcagagccaagagccgctaaggacttattagggtgggagagtaaaacgaatctgcctgaagatctcaaggagagattcgaagagtatgtgaagattggcagagacaagaaagagattaagtttgagttagacgataagatactcgaagccctcaaaactccagtggccgcttgatcaaatacgccataaagtttgttcttcatttgtaacttcttatgctacactgtgctctttcatttcccacggctcatatgagatgaacatgatttcagctaaaagatcatttaaatattcataaacaacana

SEQ ID NO: 18053 - DNA, 462 bp, Arabidopsis thaliana
  unsure at all n locations
  Clone ID: LIB35-036-Q1-E2-F2
agaagggaactttggtattgtgttcgcaaatatcttggttttgattcaaaaanaanaaaaaggtaaaganncnaaaaaanaaagcggccgctctagaggatccaagcttacgtacgcgtgcatgcgacgtcatagctcttctatagtgtcacctanattcaattcactggccgtcgttttacaacgtcgtgactgggaaaaccctggcgttacccaacttaatcgccttgcaancacatccccctttcgccagctggcgtaatancnaatanggcccgcaccgattcgccttcccaaacaagtttgcgcaaccctgaaatgggcgaaatggggaacgccgccctggtaancggggggcaattaancnccgggnggggtgttgggtnggtttacnccgcaagccgttgaacccggcttncaacntttgcccaancggcccctaaacggccccggatcccnttt

SEQ ID NO: 18054 - DNA, 406 bp, Arabidopsis thaliana
  unsure at all n locations
  Clone ID: LIB35-036-Q1-E2-F3
ggctgcgagaagacgacagaagggtacggctgcgagaagacgacagaagggtacggctgcgagaagacgacagaagggtacggctgcgagaagacgacagaagggtacggctgcgagaagacgacagaagggggaagcttagagaatcatttgttcagaagaggttcttattttcaacctttatcttggactctccggttgaaagttgctcttggtgcagcgaaaggtcttgcgtttcttcataacgccgagactagtgtcatataccgcgatttcaaaacgtcgaatatactgcttgattcggagtacaatgctaanctttctgatttcggggctaactaaagacgtccaacgggtgataaaagccatgtctctacccggtnatgggtacttaccggtacncact

SEQ ID NO: 18055 - DNA, 398 bp, Arabidopsis thaliana
  unsure at all n locations
  Clone ID: LIB35-036-Q1-E2-F8
ggctgcgagaagacgacagaagggtacggctgcgagaagacgacagaagggtacggctgcgagaagacgacagaagggtacggctgcgagaagacgacagaagggtacggctgcgagaagacgacagaagggtacggctgcgagaagacgacagaagggtacggctgcgagaagacgacagaagggggacnacaattcaaacttgtacggactaagaccagactctctctgacgttgtcagatctgcgacctgctagcganangatgcgagaggaaactgtggtttacgagcaggaggagtctgtttctcacggcggggggcaagcacangatccttgcagagcttgcccgcgttgaacaagaantcctttccttggagaaagaatttaangaagtcc

SEQ ID NO: 18056 - DNA, 412 bp, Arabidopsis thaliana
  unsure at all n locations
  Clone ID: LIB35-036-Q1-E2-F9
tcactgtgaattaatcgagagatctaaatatccgccatggacagagcacaattgatcttgttaggtctacctatattcttgttttgttcggatctcttcaacctcttcactcctccgcctcctaaacctcagcctcaccgtcctcatcagccaccgcatattcctcaccagcatcgtcctaatgcgatcatccccgaaaccctagactttccttcacagaagacaagtggcttaggaggggcaattggatatggaaatacagtagagatcaacttctgcgtctcctgttcttacaagggaactgcagtcaccatgaagaagatgttagagacggcttttcccggtttagatgtgattctcgcaaattacccaccaccagcaccaaaaacgccttctagctaaggttgtgccn

SEQ ID NO: 18057 - DNA, 394 bp, Arabidopsis thaliana
  unsure at all n locations
  Clone ID: LIB35-036-Q1-E2-G5
agaagggggagttcaaaagaaagtaagttgaagtcaatgcaagaagctcttgaccaaagtagaaccgagatgaaggctaagttttctgctgcttccatgaagaggcaggattcgatatcaagtacccgccaacgtgcagagaagttcagatcttttaactctcggacaagttcgaaaaagtatcagcatcctataagctcattacagagtgaagaggaaaacgaaaaagataggctagtcagtggacaatccattggaaaaggtgcttctaagagctcccaagttagaaaggttccatccccaaacggggaagctcacgaagtctcaaaaccgtcaggtaaagtttcaaacacaaacactaatacttctgggagangacgaaaaacatcagaga

SEQ ID NO: 18058 - DNA, 445 bp, Arabidopsis thaliana
  Clone ID: LIB35-036-Q1-E2-H12
gcgtccgtacggctgcgagaagacgacagaaggggaagggcctcagaaggaacttgggcaacttggtgtttttgctgagctgcaagcgctcttccctggtctgcgcatttatgtagatttgattggacctgacgttccacaacatatggatggagaaatgatctccctttgcagatattccccttgcatgggaaaagaatgtgaatgtaaaaattcaagcaaaattctcaattccgggagcaaacctgctttggtttcggctgtgtcattacagctccgtagagggttttaccatgatcgttacaatgacataacaaaggattcatttcctccacacatagtgattgctccaaacgcaagcatcgctgcatatccaagctggttgccaactattgaactgataagggagatacaagtcccaacagtattctccgaatactgtgaa

SEQ ID NO: 18059 - DNA, 408 bp, Arabidopsis thaliana
  unsure at all n locations
  Clone ID: LIB35-036-Q1-E2-H3
agcagaaatggcgaaatcactcctttgttcatcaaccttaaaccctttcttctccaccactctctcctcttcgaagaagaaccaaattgcatactcgggaaacagcaagaaccagacatcgtcgtctctgttatggaaaagaagggaactgtcgcttggatttatgagcagcttagttgcgattggtctcgtgagtaatgacagaagaagacacgacgcgaatgcagcgattcttgaagctgatgacgatgaagagcttctcgagaaagtgaagcaagatcagaaaaagaggattgagagacaagctgttctcaattctgctgtcaaggaaaagggtattttgcaggatcttgtttacaagttgancaaggtaggacaagccattgagaacatgatttaacaactggc

SEQ ID NO: 18060 - DNA, 413 bp, Arabidopsis thaliana
  unsure at all n locations
  Clone ID: LIB35-036-Q1-E2-H8
aagacgacaganggggcgaaacaaaaactcgtggaggagatatgcaattgctgacgctaaatccggcggccatttccaggacgccgccgcaagccatanacccttcctcatcctcgagtcttcttcntccttttcctcagattttgagctcccaacgcgctcttggtcttgtanctaggccttgtaatccacttcgacgaggattatctaggtttttatcaagtcgacagcttttccgacgatccaaagttgtcaaggcagtagcaaccccagaccccatcttggaagtacctttaactgaggaaaatgtanaaagcgttttggatgaaatccgaccttaccttaagtctgatggtggtaatgtggcattacatgagatngaagggaaatattgtgccggttaagccgcacgg

SEQ ID NO: 18061 - DNA, 420 bp, Arabidopsis thaliana
  unsure at all n locations
  Clone ID: LIB35-036-Q1-E1-H4
aagacgacagaagggtacggctgcgagaagacgacagaaggggtagccgagaaacaacggttggcgaagtcatctcttgctttcaattgtaaaagtgtaacattccggaaactatttcctgagtatgtcgagaagtacagccagcaacaagtagctgaagaagaagcagccactcaacagacaacaacatctgagaatcaggattttcctcagaaggacaatgcgaaagtcgaatcagagaaaagcgttggtcttaaaaaggaaagtattcaagaagtgggattgaaagagaggagaaggaacaagaaagaagcattaccgggttggataatattgttgctagtatcgattgtccgtgttgtaatggcgttgccnttgcntcaactgtgatttagatgcaaatgcaacgcaacacaacat

SEQ ID NO: 18062 - DNA, 451 bp, Arabidopsis thaliana
  unsure at all n locations
  Clone ID: LIB35-036-Q1-E1-H7
gcgtccgtacggctgcgagaagacgacagaaggggaagcaagagagtattttggggaagctcttcttcatggagcttgaattctcactctgctactgctaaatcgatgttagatagtgcccatcgccagtattctactcactctccatcggaaaccaaatcacagaaaatgctctattacctcaccgctgttgtctttggtatggtggggttaacttacgctgctgtgccattgtatagaacattctgccaagctactggatatggaggtactgttcaacgcaaagagactgttgagaagaagattgctaggcattcagaatctggtaccgtcactgaaagggagattgtggtgcagttcaatgctgatgttgcagatgggatgcantggaantcaactccncacaaagagaggttagagtaaagccaggagaaagtgcactccccatttt

SEQ ID NO: 18063 - DNA, 409 bp, Arabidopsis thaliana
  unsure at all n locations
  Clone ID: LIB35-036-Q1-E1-H8
aagacgacagaaggggcgaaacaaaaactcgtggaggagatatgcaattgctgacgctaaatccggcggccatttccaggacgccgccgcaagccatagacccttcctcatcctcgagtcttcttcttccttttcctcagattttgagctcccaacgcgctcttggtcttgtagctaggccttgtaatccacttcgacgangattatctaggtttttatcaagtcgacagcttttccgacgatccaaagttgtcaangcagtagcaaccccagaccccatcttggaagtacctttaactgaggaaaatgtagaaagcgttttggatgaaatccgaccttaccttatgtctgatggtggtaatgtggaattacatgagatcatggaatattgtgcgggtaancgcaggga

SEQ ID NO: 18064 - DNA, 428 bp, Arabidopsis thaliana
  unsure at all n locations
  Clone ID: LIB35-036-Q1-E1-H3
agcagaaatggcgaaatcactcctttgttcatcaaccttaaaccctttcttctccaccactctctcctcttcgaagaagaaccaaattgcatactcgggaaacagcaagaaccagacatcgtcgtctctgttatggaaaagaagggaactgtcgcttggatttatgagcagcttagttgcgattggtctcgtgagtaatgacagaagaagacacgacgcgaatgcagcgattcttgaagctgatgacgatgaagagcttctcgagaaagtgaagcaagatcagaaaaagangattgagagacaagctgttctcanttctgctgtcaaaggaaaangggtatttgcaaggatcttggtttacaaatttgagcaaggnaaggacaagccaatgaagaacaaatgatttaacaacttgcaaggtttggntt

SEQ ID NO: 18065 - DNA, 412 bp, Arabidopsis thaliana
  unsure at all n locations
  Clone ID: LIB35-036-Q1-E2-A1
gaagggtacggctgcgnnnnnnnnnnnnnnnnnnnnnnnnnnnnnnnnnnnnnnnnnnnnnnnnnnnnnnnnnnnnnnnnnnnnnnnnnnnnnnnnnnnnnnnnnnngcggccgctctanaggatccaagcttacgtacgcgtgcatgcgacgtcatagctcttctatagtgtcacctaaattcaattcactggccgtcgttttacaacgtcgtgactgggaaaaccctggcgttacccaacttaatcgccttgcagcacatccccctttcgccagctggcgtaatagcgaagaggcccgcaccgatngcccttcccaacagttgcgcancctgaatggcgaatgggacgcccctgtaccggngcaataancnccgcgggtgttgtggttaccccaacgtgaccctaacntg

SEQ ID NO: 18066 - DNA, 421 bp, Arabidopsis thaliana
  unsure at all n locations
  Clone ID: LIB35-036-Q1-E2-A10
nnnnnnnnnnnnnnnnnnnnnnnnnnnnnnnnnnnnnnnnnnnnnnnnnnnnnnnnnnnnnnnnggattaccggagttcgaagagtcggcgccggatggctttgatccggaaaatccatacaaggatccggtggcgatggttgaaatgagagagcacatcgttcgagagaaatggatccaaatcgagaaggctaagatcttgcgtgagaaggtcaaatggtgttaccgcgtcgaaggagtcaatcactatcagaaatgtcgtcatcttgttcagcagtatctcgattccactcgcggcgtcggttggggaaaggatcatcgtcctatttcgctccacggtcccaaaccggaggctgttgaagctgaataatgttgtgtgcctcattgagatgtctgaagtttttgatatgggacatagaat

SEQ ID NO: 18067 - DNA, 424 bp, Arabidopsis thaliana
  unsure at all n locations
  Clone ID: LIB35-036-Q1-E2-A11
gctgcganaagacgacanaagggtacggctgcgagaagacgacagaagggtacggctgcgagaagacnanagaagggtacggctgctagaagacgacagaanggtatggctgcgataagacnacaganggggagaaaccacaagagaaaaaggtgagtttgagggaacttccaangtataaatgggtcgatgtcagagttggcgagttcgtacctgataaatcctctgccggacagatcactttctcaatgtatgagcatgcggctggtgtttggnagaaagggctctcctcaaaggtgttgcaattcgtcccaganagtaataattgttatggcatagncaacatanntctccntntgcaccaatggaacttctcancatatatttcacatcatgtcatgtntgtataataacggttgttcca

SEQ ID NO: 18068 - DNA, 452 bp, Arabidopsis thaliana
  unsure at all n locations
  Clone ID: LIB35-036-Q1-E2-A3
nacttcgntanggcngcnaaaacnacagaagggggaccaaaatcgtcnattgaagtgaacagtcagcatcgttttgcttgcttgtgcgtttctctcgaactctctccatggctgttgcgctccaattcagccgattatgcgttcgaccggatactttcgtgcgggagaatcatctctctggatccggatctctccgccgccggaaagctttatcagtccggtgctcgtctggcgatgagaacgctccttcgccatcggtggtgatggactccgatttcgacgccaaggtgttccgtaagaacttgacgagaagcgacaattacaatcgtaaagggttcggtcataangaggagacactcaagctcatgaatccagaatncaacaattgataaaattggagaacactgaaaacaaatgggtaaaactaatccttgggaaaatgttacngtgaa

SEQ ID NO: 18069 - DNA, 420 bp, Arabidopsis thaliana
  unsure at all n locations
  Clone ID: LIB35-036-Q1-E2-A5
agaagggggacgaagaaaatggcggatttgattttgagttcctcctctgcacaatcctctctccttcacgtcagacctaatcactatctactcaatacctccactgcttcaccgatccgaagtgtcagattccaaaattccaacggttttcatcctctggcgttcgcatctggtcaccgacgacttcctctcggtgcagtagttccctctgactccactaagacgatcaccagtacgattactgctaactgcgttgattcgggagtcaaagctgttgaagtcgagcctatgatcgattacnnnnnnnnnnnnnnnnnnnnnnnnnnnnnnnnnnnnnnnnnnnnnnnnnnnnnnnnnnnnaatgacgacnggaggggaagacgataaggagganatgaccggaagaagaacacnctctgt

SEQ ID NO: 18070 - DNA, 413 bp, Arabidopsis thaliana
  unsure at all n locations
  Clone ID: LIB35-036-Q1-E2-A6
aagacgacagaagggggatgtggcaaggctacacttgtgtttgcacttgattatcttttcaagacaacaaaaaagaagtcagcgacgatatccgtagacgatttttacttgactgcagaaggccaggctgaattgagaaaaaagaatccaggaaatgcacttctagagtatcgtggaaatgcaggaagtcatgatctgaaactttctgttgaaacactagaagccctgtcgaaactgaccaaagaaggcttaaagatgaaggtacctaggtacaataagtctgcctatagtgggagaggtgacanggccgattcatcaacatggcctgaagttgaaggacctctatcggttattctccttgaaggaatggatgcttggttttaagcctcntccagctgacgttgttaaagcaa

SEQ ID NO: 18071 - DNA, 200 bp, Arabidopsis thaliana
  unsure at all n locations
  Clone ID: LIB35-036-Q1-E2-B1
ggctgcgagaagacgacagaaggatacggctgcgagaagacgacagaaggatacggctgcgagaagacgacagaaggatacggctgcgagaagacgacagaaggatacggctgcgagaagacgacagaaggatacggctgcgagaagacgacagaagggcnnnnnnnnnnnnnnnnnnnnnnnnnnnnnnnnnnngcggc

SEQ ID NO: 18072 - DNA, 425 bp, Arabidopsis thaliana
  unsure at all n locations
  Clone ID: LIB35-036-Q1-E2-B10
agaaggggaccacttgcagtttttcttattctcctgtcttgtctaaagaaaaaagagagaggaagaaatggagacttttgaggaaagctctgatttggatgttatacagaaacatctatttgaagacttgatgatccctgatggtttcattgaagattttgtctttgatgatactgcttttgtctccggactctggtctctagaaccctttaacccagttccgaaactggaacctagttcacctgttcttgatccagattcctatgtccaagagattctgcaaatggannnnnnnnnnnnnnnnnnnnnnnnnnnnnnnnnnnnnnntgaggttgagactgtctcaaaccggaaaaaaacaaagaagtttgaagaaacgaagacattacagaagcgtgagaaggangccatgggggaaatttgca

SEQ ID NO: 18073 - DNA, 410 bp, Arabidopsis thaliana
  Clone ID: LIB35-036-Q1-E2-B11
tcttcagagaatttcaccttctagggtttgttcaagagaggtcttgggaaaatgagtcgtggaggtgcagctgttgccaagggaaagaagaagggagtttccttcaccattgattgttcaaagcctgtcgatgacaagatcatggagattgcttcccttgagaagtttcttcaggagaggatcaaggtcggtggcaaagctggtgcacttggtgattctgtcacaatcacacgtgagaagagcaagatcactgtcactgcagatggccaattctccaagaggtatttgaagtacttgacaaagaagtgcctgaagaagcacaatgtaagggattggctcagagtgattgcagcaaacaaggatcgtaacctctatgagttgaggtacttcaacattgctgagaacgaagg

SEQ ID NO: 18074 - DNA, 278 bp, Arabidopsis thaliana
  unsure at all n locations
  Clone ID: LIB35-036-Q1-E2-B5
actgttcttctngcgccgtaccggtcaagaaattcccgggtcgacccacgcgtccgtacggctgcgagaagacgacagaagggtacggctgcgagaagacgacagaagggtacggctgcgagaagacgacagaagggtacggctgcgagaagacgacagaagggaaaactctttcttatgtcttgttgatctcaatagcattgatacaatgtatatatatgcaatttagaatatgttctatcnnnnnnnnnnnnnnnnnnnnnnnnnnnnnngcggcc

SEQ ID NO: 18075 - DNA, 419 bp, Arabidopsis thaliana
  unsure at all n locations
  Clone ID: LIB35-036-Q1-E2-B8
gacganagnagggggggcaaggccttatagagattacacaacacagananattacacactganaaacaganaatggtaactgangccttgcccaaatgccctgaanctccactcgtacttggactccaacccgcagctcttatcgataacgtcgctcctgttgattggcctttactcgatcaaattcccggtgatcgcggtggctccattgccgtgcanaangatgagttanaagcacatgctaaaagagcttgatgcacatatcagttgtggctccattaaataagatggctgngaggaagtgtgaccaatacaattcnangcttgaagtgttgggttcggtgtagccactgggattattggtgcctatgganacgatgaacaacgccaattgtttgttagcaataagggttttaatg

SEQ ID NO: 18076 - DNA, 437 bp, Arabidopsis thaliana
  unsure at all n locations
  Clone ID: LIB35-036-Q1-E2-C4
agaaggggggagctatcgaaaattctgaatctgaaaggtttgagtgaagatgtcttcagatcggaaggttctaagttttgaagaagtttcaaagcacaacaaaactaaggattgttggcttattatttccggcaaggtgtatgatgtgactccattcatggatgatcatcctggaggcgatgaagtcttgttgtcctcaacagggaaagatgctacaaatgattttgaagacgttggtcacagcgacactgcaagggacatgatggacaaaatatttcattgggtgagatttgattccgtcctaagtgttccaagcaactaaggacatacgttgcaaccacaagcaaaccaanctgcaaccaaagacaaagacaccaagaattcaattatcaaagaatccttcaagttcccttgttccgattcttgatcttgggaat

SEQ ID NO: 18077 - DNA, 419 bp, Arabidopsis thaliana
  unsure at all n locations
  Clone ID: LIB35-036-Q1-E1-A6
aagacgacagaagggggatgtggcaaggctacacttgtgtttgcacttgattatcttttcaagacaacaaaaaagaagtcagcgacgatatccgtanacgatttttacttgactgcagaaggccaggctgaattgagaaaaaagaatccaggaaatgcacttctagagtatcgtggaaatgcacgaagtcatgatctgaaactttctgttgaaacactagaagccctgtcgaaactgaccaaagaangcttaaagatgaaggtacctangtacaataagtctgcctatagtgggagaggtgacagggccgattcatcaacatggcctgaagttgaaggacctctatcggttatcctctttgagggatggatgcttggtttaaacctcttcaactgacgttgttaaagcanttgacccac

SEQ ID NO: 18078 - DNA, 423 bp, Arabidopsis thaliana
  unsure at all n locations
  Clone ID: LIB35-036-Q1-E1-A8
agaaggggatcgaaacaaaaaataattaagagagaaaaaaacaaaaaacattttccatctctctctctctctctctcgcctgcttcaagaaatggatcggcaaagttccgatgacatcatgaaatttctcgacggcatggctagttccgacgatgttctttttggcttcctcgacgaaggaaaccactcaccgaagtatctagcctcctccgagaagctggctatgattgcgtcatttccaaatctaagtggagaagctctcatgagatccctgcaggtgagcatgaatacttggaggtcgtggacaaatcggtttcaaagaaaggcgagattcgggtggtgatcgaactatgttttanggcggagtttgacatggcaanagcagtgaagagtacaagcgactcatcggaatgttaccggaat

SEQ ID NO: 18079 - DNA, 201 bp, Arabidopsis thaliana
  unsure at all n locations
  Clone ID: LIB35-036-Q1-E1-B1
ggctgcgagaagacgacagaaggatacggctgcgagaagacgacagaaggatacggctgcgagaagacgacagaaggatacggctgcgagaagacgacagaaggatacggctgcgagaagacgacagaaggatacggctgcgagaagacgacagaagggcnnnnnnnnnnnnnnnnnnnnnnnnnnnnnnnnnnngcggcc

SEQ ID NO: 18080 - DNA, 482 bp, Arabidopsis thaliana
  unsure at all n locations
  Clone ID: LIB35-036-Q1-E1-B4
ttactctgccgncncggtccgaaatncccgggtcnacccacgcgtccgtacggctgcgagagacgacagaagggtacggctgcgagaagacgacagaagggtacggctgcgagaagacgacanaagggtacngctgcgagaagacgacagaagggtacggctgcgagaagacgacagaagggtacngctgcgagaagacgacagaaggggagagaagaanaanatgtcnatgattccgatcagcaatcgccggngactatctcccggcgatagaatctgggaaccatttgaactcatgaacacctttcttgatttcccatcaccagctctctttctttctcaccactttccctcacnttctcgagaaatantcccacaaacttcatcatccaccgtcaatacgcagctcaatttggaccganactccgacggntcacgttttcaaancgtatcctccgggagtggatcaagacaantgattg

SEQ ID NO: 18081 - DNA, 192 bp, Arabidopsis thaliana
  unsure at all n locations
  Clone ID: LIB35-036-Q1-E1-B5
ggctgcgagaagacgacagaagggtacggctgcgagaagacgacagaagggtacggctgcgagaagacgacagaagggaaaactctttcttatgtcttgttgatctcaatancattgatacaatgtatatatatgcaatttagaatatgttctatcnnnnnnnnnnnnnnnnnnnnnnnnnnnnnngcggcc

SEQ ID NO: 18082 - DNA, 496 bp, Arabidopsis thaliana
  unsure at all n locations
  Clone ID: LIB35-036-Q1-E1-C1
ntgtttacttctgccggtcccgggtccgaaaattcccggggtcnacccacgcgtccgacggctgcgagaagacgacagaagggtacggctgcgagnnnnnnnnnnnnnnnnnnnnnnnnnnnnnnnnnnnnnnnnnnnnnnnnnnnnnnnnnnnnnnnnnntgaatttcatctccgatcaggtaaagaaactctcaagctcaacaccagaggagccagaccacaacaagccagtcgaaggaaccgaaacagctacaagaccggctgccaacgccgagcccatggcaagtgccaaggttgtagctgaagctgctcaagccgcagctcgttaacgaatcagacaaactcgacaaggggtaantcgccgaagctctgctgatatcttagacgctgccgaaaaatacgtagtttcatgaaagatnatactgtcaatactcnacaaggtgagaanttctcaacgactacnattctcaaatccaccgggctggtggccnccc

SEQ ID NO: 18083 - DNA, 475 bp, Arabidopsis thaliana
  unsure at all n locations
  Clone ID: LIB35-036-Q1-E1-A5
cgnaattctcgggtcaacccacgcgtccgtacggctgcgagaagacgacagaagggggacgaagaaaatggcggatttgattttgagttcctcctctgcacaatcctctctccttcacgtcagacctaatcactatctactcaatacctccactgcttcaccgatccgaagtgtcagattccaaaattccaacggttttcatcctctggcgttcgcatctggtcaccgacgacttcctctcggtgcagtagttccctctgactccactaagacgatcaccagtacgattactgctaactgcgttgattcgggagtcaaagctgttgaagtcgagcctatgatcgattacnnnnnnnnnnnnnnnnnnnnnnnnnnnnnnnnnnnnnnnnnnnnnnnnnnnnnnnnnnnaaatgacgacggaggggaagacgataaggaggagagtgacgggaagaagaacacgcctcctgtcaag

SEQ ID NO: 18084 - DNA, 422 bp, Arabidopsis thaliana
  unsure at all n locations
  Clone ID: LIB35-036-Q1-E1-C5
aagacgacagaagggtacggctgcgagaagacgacagaagggtgccgaaaagagagagagaaaacaaaacaaaaaatggctacccgaaaagctctgatcaacgttcaccggatcattcgctccaccgccgtggttggccggagctctatcattcctgccgccgctaaccggtcatatcctattatattccggaatggagttgatttgggggcgagattcttctgtgagaacactgcgtctgcccagaatttcgatattgatctctctaacgaagagaataagagaagaacgatcaacagattgttgtatangagcaagcaaagagggtttttggaacttgatcttgttttggggaattgggttgaggagaatgttaattccatggacgaaaatggtgttaatccctaaatcagtccncaatt

SEQ ID NO: 18085 - DNA, 424 bp, Arabidopsis thaliana
  unsure at all n locations
  Clone ID: LIB35-036-Q1-E1-C7
cgtccgtncggctgcnanaagacgacagaaggggaangaaagaaaacgagagaggtacgtagaagaaaatggctgccttatcagagaaagaggctgaagcttatctcgacgcaaggcctagatatccgatcgattggtttaagaaaattgccgcacggacacaggaccacaaatttgcttgggatgttggaactggtaatggtcangctgctattgggcttgtggagcattacgagaatgtagtggctaccgatataaacgaancacaacttcaacgagcaatcaaacactcaagaatcagttaccatcacactccaacaacgatatcagaagatganatggtggntcnactcgggggaagaaaactcccttggatctcataatttgctggctcaagctgtccaatttcttccaacctcaacgt

SEQ ID NO: 18086 - DNA, 497 bp, Arabidopsis thaliana
  unsure at all n locations
  Clone ID: LIB35-036-Q1-E1-D4
actgttatcttgccgcccggtccgaaatacccgggtcgacccacgcgtccgcccacncgtccgtacggctgcgagaagacgacagaatggtacggctgcgagaanactacacaagggtacggctgcgagaanacgacagaagggtacggctgcgagaagacgacagaagggtacggctgcgataagacgacagaagggtacggctgcgacaacacgacagaanggtacggctgcnataagacnacanaanggtacggctgcgagaatacgacagaagggtacngctgcganaagacgacagaagggtactgctgcgagaanacgacagaacnggtacggctgcgagaagacnacagaatggtacggctgctagaagactacagaacggtactgctgcgataaaacnacagatgggcaagataattaagaccaccaattggatcccntaaaaaaaacggccctcnaaaaggttcaacctacnttaccttcatgcgact

SEQ ID NO: 18087 - DNA, 421 bp, Arabidopsis thaliana
  unsure at all n locations
  Clone ID: LIB35-036-Q1-E1-D5
aagacgacagaaggggaacatcaaaaactaacacagaaagaaaaaaaacagttcctgttctattanattgttttctaaattgtctgaaaatcatggaagtaacttccnaatctaccctccctccagggttcagatttcatcctaccgacgaggaactcatcgtttactatcttcgaaaccagaccatgtctaaaccatgccctgtctccatcatcccagaagttgatatctacaagttcgacccatggcaattacccgagaaaacagagtttggagaaaatgagtggtatttcttcagccctanagaangaanatatccaaacggagtcagaccaaaccgggcagctgtttccggttactgggaaagcaacccggtacaagacattccaatcacagcggttcaagttacntttggtgttaa

SEQ ID NO: 18088 - DNA, 373 bp, Arabidopsis thaliana
  unsure at all n locations
  Clone ID: LIB35-036-Q1-E1-D7
ggctgcgagaagacgacagaagggtacggctgcganaanacgacagaagggtacggctgcgagaagacgacagaagggtacggctgcgagaagacgacagaanggtacggctgcgagaagacgacanaanggtacggctgcgagaagacgacanaacggtacggctgcganaanacnacagaagggtacggctgcgagaagacgacagaanggtacggctgcgaaagacgacagaagggtacggctgcgagaagacgacagaangatacggctgcgagaagacgacanaagggtacngctgcnagaagacgacagaanggtaccgctgcnanaagacgacagaagggtacggctgctanaagacgacagaagg

SEQ ID NO: 18089 - DNA, 386 bp, Arabidopsis thaliana
  unsure at all n locations
  Clone ID: LIB35-036-Q1-E1-E8
ctgcgagaagacgacagaagggtacggctgcgagaagacgacagaaggggagcggcggtgagattagagaagaagggtttgtgaaatggagtccagtgaggatgtggagaatctgagtagagctattgagaagcttcttcatgagaagaggaagagagaagcttctggtgacgccttcattgaagacgctgatgatcagcttttcctctctagccttatctctcagttgnnnnnnnnnnnnnnnnnnnnnnnnnnnnnnnnnnnnnnnnnnnnnnnnnnnnnnnnnnnnnnnnnnnnnnnnnnttcttcaccatccaaaggaaaaagcgagggccagagacaatttggaagaaatatagaagaaatagctaaagacatcaagaagg

SEQ ID NO: 18090 - DNA, 414 bp, Arabidopsis thaliana
  unsure at all n locations
  Clone ID: LIB35-036-Q1-E1-F3
ggctgcgagaagacgacagaagggtacggctgcgagaagacgacagaagggtacggctgcgagaagacgacagaagggtacggctgcgagaagacgacagaagggtacggctgcgagaagacgacagaagggggaagcttagagaatcatttgttcagaagaggttcttattttcaacctttatcttggactctccggttgaaagttgctcttggtgcagcgaaaggtcttgcgtttcttcataacgccgagactagtgtcatataccgcgatttcaaaacgtcgaatatactgcttgattcggagtacaatgctaagcttccgaattccggctaacttaaagacgtccaaccggtgataaaaancattcccacccggttnagggtacttacgggatacccactcccgaatatc

SEQ ID NO: 18091 - DNA, 331 bp, Arabidopsis thaliana
  unsure at all n locations
  Clone ID: LIB35-036-Q1-E1-G4
gcggacgcgtgggtacggctgcgagaagacgacagaagggtgnnnnnnnnnnnnnnnnnnnnnnnnnnnnnnnnnnnnnnnnnnnnnnnnnnnngcggccgcnctanaggatncaagcttacgtacgcgtgcatgcgacgtcatagctcttctanagtgtcacctaaattcaattcactggccgtcgttttanaacgtcgtgactgggaaaaccctggngttacccaacttaatcnccttgcagnaaatccccctttcgccagctggcgtaatagcgaanaggcccgcaccgatngcccttcccaacagttgcgcancctgaatggcgaat

SEQ ID NO: 18092 - DNA, 457 bp, Arabidopsis thaliana
  unsure at all n locations
  Clone ID: LIB35-036-Q1-E1-G5
gcgtccgtacggctgcgagaagacgacagaagggggagttcaaaagaaagtaagttgaagtcaatgcaagaagctcttgaccaaagtagaaccgagatgaaggctaagttttctgctgcttccatgaagaggcaggattcgatatcaagtacccgccaacgtgcagagaagttcagatcttttaactctcggacaagttcgaaaaagtatcagcatcctataagctcattacagagtgaagaggaaaacgaaaaagataggctagtcagtggacaatccattggaaaaggtgcttctaagagctcccaagttagaaaggttccatccccaaacgggagctcacgagtctcaaaaccgtcaggtaaagttcaaacacaaacactaatacttctgggaanaagacgaanaacatccagngattaaaactgggttacacaatccttcccntcccaaaatt

SEQ ID NO: 18093 - DNA, 488 bp, Arabidopsis thaliana
  unsure at all n locations
  Clone ID: LIB35-033-Q1-E1-C10
tgtctgcccggntctaccggaacggacatcccggntcgacccacgcgtccgtacagctgcgagaagacgacagaagggggaagcaaattagcactgaccgatcgatccatggaagaggtgaagaaggatgtatactcggtttgggcattaccagatgaggaatcggagccccgattcaaaaagctaatggaagctttgagatccgaattcactggcccaagattcgttcctcacgtcaccgtcgccgtatctgcttatctgacggcagacgaagccaagaagatgttcgaatcagcttgcgacggtcttaaagcttacaccgccaccgttgatcgcgtctccaccggaactttcttctttcaatgcgttttcttgcttctccaaaccacccctgaggtaatggaagctggtgaacactgtaagaaccatttcaattgttccactaccacaccttacatgccgcanttgagcctgctttacgctgagtt

SEQ ID NO: 18094 - DNA, 503 bp, Arabidopsis thaliana
  unsure at all n locations
  Clone ID: LIB35-033-Q1-E1-C2
gtctgcctggncctaccggcccgganatcccgnagtcgacccacgcgtccgtacggctgcgagaagacgacagaagggtacggctgcgagaagacgacagaaggggagaccaacaaataaacattaaacccaaatgatatattttggtagatcaatcgacaatcattatacaacaatgatgacaaaaacattggagattgatttgagatcagcagaagggcttaagctaaaccggagacccatcaagaaaaagactttcgccgtcgtaaaaatcgacgagaaatgtcgaaaatctaatcttgacgaatcgagaagaagcaatcctacatggaactataaatcagagatgcccatcaatggtaatgaacagtttatcttcattgaggtattttatcgaacaggttctgggcatgataaaaaaatcggagaagctaaaatcccaacgaatgatttcatgggaaggtattcacctgaaggncacttaaacttcttgagctataaat

SEQ ID NO: 18095 - DNA, 503 bp, Arabidopsis thaliana
  unsure at all n locations
  Clone ID: LIB35-033-Q1-E1-C1
aactggtttgcctgtnctaccgccccggaaatcccgantcgacccacgcgtccgtagctgcgaagaagacgacagaatttttgaagcttctctctgcttatcgacacgatggttctcgaggcgactatgatatgtattgacaactccgagtggatgcgaaacggagattactctccgtctaggttacaggcgcaaacggaagctgttaatcttctttgcggagccaaaacccagtcgaatccggagaatacggtggggattttgacaatggctggcaaaggagttagagtattgactactcctacctctgatcttggcaaaattctggcctgtatgcacggtcttgatgtgggaggagagagcaagacaagaagctgctgccaagaaggcggccgatgaggcaggtcagaaagacaaagatggggacacagcttccgcctcacaagagacaagttgctangacaactgacaagaatgctgaaccaatgggatgaggacagtgc

SEQ ID NO: 18096 - DNA, 491 bp, Arabidopsis thaliana
  unsure at all n locations
  Clone ID: LIB35-033-Q1-E1-C3
cctggncctaccggcccggaaatcccgnagtcgacccacgcgtccgtacggctgcgagaagacgacagaaggggaagacaaaaaagggtaatttgaaaattttcagatagaaacagtcccgtcaccggcgacgatgaaatggttgctcgtcgccgtattgacctctcttacgatcttctccgccttaacacagtcccatctcctccatggatctccggtcaattctctctgcgctgatctcattcatcccgctaattactcctgcactgaacacagtattcaaacaaaggatggttacatattagctcttcaacgtgtagcttctcttggtccaagacttcaatctggtccacctgttttgcttcagcacggtctctttatggctggagatgtgtggttcttgaattcaccaaaagagtcactangtttcattcttgctgatcatgggtttgatgtttgggttggaaatgttcgtggtacacgttacagtt

SEQ ID NO: 18097 - DNA, 493 bp, Arabidopsis thaliana
  unsure at all n locations
  Clone ID: LIB35-033-Q1-E1-C4
cctaccgccccggaaatcccgangtcgacccacgcgtccgtacgagctgcgggaagacgacagaaggggattcaccggttgttatatcgtcgattcatcgtcgtcgacggcgagtacttgtgacctccacacccagattaatcttctataactgattttatcgcttagacgatcacgatctcatcgattaactgacaaatgaagcatgtagtaaagatcttgagcctgttggtggctatctctgccttctggattggtcttttgcaggctgcaattattcctcgaagccatacatggttgctaccgatctactttgttgtatccctcggatgctatggcctattaatggttggagtcgggctcatgcagtttcctacttgcccccaagaagcagttctgctgcagaaggatattgcagaggctaaagggcttcttcaagcacaaangggtanatgtttggatncaantgacacaaaggcntttatcagaccat

SEQ ID NO: 18098 - DNA, 420 bp, Arabidopsis thaliana
  unsure at all n locations
  Clone ID: LIB35-033-Q1-E1-C5
aagacgacagaagggggtacgtcttttgcataagaagaaacagagagcattatcaattattaacaattnnnnnnnnnnnnnnnnnnnnnnnnnnnnnnnnnnnnnnnnnnnnnnnnnnnnnnnnnngctttggccacgacggcaccgttagctccggtcaccagtcaacgaaaagtacggaacgatttggaggaaacattaccaaaaccatacatggcaagagcattagcagctccagatacagagcatccgaatggaacagaaggtcacgatagcaaaggaatgagtgttatgcaacaacatgttgctttcttcgaccaaaacgacgatggaatcgtctatccttgggagacttataagggatttcgtgaccttggtttcaacccaatttcctctatcttttggaccttactcataaaa

SEQ ID NO: 18099 - DNA, 491 bp, Arabidopsis thaliana
  unsure at all n locations
  Clone ID: LIB35-033-Q1-E1-C6
cccctggacctaccaatccggaattcgcnggtcgacccacgcgtccgtacggctgcgaagaagacgacagaagggggccgagatgagttatcttctgaagacgttaacgacgaaggaagagattgatcgggttatcagagacaccattgatgaagttcttgttttacgatttggtcgttcctccgacgccgtttgtcttcagcatgatgaaatccttgcgaaatcggtgagagatgtttcgaaatttgctaaggtagctttggttgatgttgattcagaggatgttcaagtgtatgtgaagtattttgatatcacgttgtttccttcgacgatcttcttcttcaatgcgcatcatatgaaattggattctggaactgcggatcatactaaatgggttggtgcatttcatananaacaagactttantgatgttgttgaggctatatatcgaggagcantganagggaantgattgttcaatgtccaagacc

SEQ ID NO: 18100 - DNA, 412 bp, Arabidopsis thaliana
  Clone ID: LIB35-033-Q1-E1-C7
gaaggggagagaaagagagagaaacaatggaaacggaaggaagaagacgagaagtggttgtttcatctctccaattcgcttgcttcgacgatatctccaccaatgtcgccgccgctgagcgattagtcagagaagctcacgctaaaggagctaatatcattcttattcaggaactttttgaaggatattacttctgtcaagcacaaagagaagacttctttaagcgagccaagccttacaagaaccatcctaccattgcaaggatgcagaagctggcaaaggaattgggtgtagtgatacctgttagtttctttgaggaggcaaatactgcacattacaattcgattgctataattgatgctgatggaactgacttgggaatttataggaagtctcatattcctgatggact

SEQ ID NO: 18101 - DNA, 423 bp, Arabidopsis thaliana
  Clone ID: LIB35-033-Q1-E1-D11
agaagggggaacatccggcggatgcggctgtacgatcccaaccaggagactctcaacgctctccgcggctccaatatcgagctcgtgctcgatgttccaaaccctgatctccagcgtctcgcctccagccaagcggaagccgacacatgggtccgcaacaacgtccgcaactatgcaaacgtcacatttcgctacatctctgtcgggaacgaggtacagccctcagaccaagctgcgagctttgtcctccccgcgatgcagaacatagagagagcagtttcaagcctcgggatcaaggtctcgacggctatagacaccagaggcatttccgggtttccgccgtcaagtgggacgttcacaccggagtttaggagctttatcgcaccggtgataagtttcttgtcaaagcaaagcaatctcctc

SEQ ID NO: 18102 - DNA, 419 bp, Arabidopsis thaliana
  unsure at all n locations
  Clone ID: LIB35-033-Q1-E1-D6
cgtgggcggctgcgagaagacgacagaaggggatcaaaggggtttttagggtttcgtcactcgccgataatcctctctctctagaaaacatgactgccgaacagaaagtggagctcgccgccaaattgnnnnnnnnnnnnnnnnnnnnnnnnnnnnnnnnnnnnnnnnnnnnnnnnnnnnnnnnnnnnnnnnnnnnnnnnnnnnnnnnnnnnnnnnnnnnnnnnnnnnnnnnnnccggtggccggtcaaagcaaagcagaagtgagaaaaagagtcgtaaagctatgttgaagcttgggatgaaaccaatcactggtgttagccgtgtcaccgtcaaaaagagcaagaatatcttgtttgtgatatcaaaacctgatgtgttcaagagtccagcttcagatacatatgtgatctttggt

SEQ ID NO: 18103 - DNA, 424 bp, Arabidopsis thaliana
  unsure at all n locations
  Clone ID: LIB35-033-Q1-E1-E11
ttgtttgccctggccctaccgnanccgganattcccggcgtcgacccacgcgtcngcccacgcgtccgcccacgcgtccgcccacgcgtccgtacggctgcgagaagacgacagaagggtacggctgcgagaagacgacagaagggtacggctgcgagaagacgacagaagggtacggctgcgagaagacgacagaagggtacggctgcgagaagacgacagaagggtacggctgcgagagacgacagaaggatacggctgcgagaagacgacagaaggatacggctgcgagaagacgacagaagggtacggctgcgagaagacgacagaanggtacggctgcgagaagacgacagaagggtacggctgccaagaagacgacagaagggctcaaaaaaaaaanntnnnnannaaaaaaaagcgg

SEQ ID NO: 18104 - DNA, 501 bp, Arabidopsis thaliana
  unsure at all n locations
  Clone ID: LIB35-033-Q1-E1-E3
gtctgcctggtncctaccggcnccggaaatcccggngtcgacccacgcgtccgtactgcgagaagacgacagaaggggatctcactttgttcatctaaaaactcctcctttcatttccaaacaaaaacttctttttattctcacatcttaaagatctctctcatggcgatgtctttctcaggagctgttctcactggtatggcttcttctttccacagcggagccaagcagagcagcttcggcgctgtcagagtcggccagaaaactcagttcgtcgtcgtttctcaacgcaagaagtcgttgatctacgccgctaaaggtgacggcaacatcctcgatgacctcaacgaggccacaaagaaagcttcagatttcgtgacggataaaacaaaagaggcattagcagatggtgagaaagcgaaagactacgttgttgaaaaaaacagtgaaaccgcagatacattgggtnaangaaaagaancgcaaacaaggcggcagaat

SEQ ID NO: 18105 - DNA, 410 bp, Arabidopsis thaliana
  unsure at all n locations
  Clone ID: LIB35-033-Q1-E1-E5
ttggagccatggaatgcaggaaactatgttcaattatccaacatatactctgttggtggcagatgggacgaagctgctgaagtaagggacatgatgaacaagaaaggtatgaagaagatcccgggatatagttggatcgagttggaagggaaggtccatgagtttctagcagatgataaatcttatcctctaagcgacaagatatatgcaaagctagaagatttgggtaatgaaatgaggcttatgggttttgttccaacgacagaatttgttttcttcgatgttgaagaggaagaaaaagaaagggtcttggggtatcacagcgagaancttgcggttgcgttagggctgatcanttacggatcatgggccaagtgattccggtggtgaaagaatctaaanggtatgtg

SEQ ID NO: 18106 - DNA, 432 bp, Arabidopsis thaliana
  unsure at all n locations
  Clone ID: LIB35-033-Q1-E1-E7
aactgtccccctggccctaccantccgganttcccnggtcgacccacgcgtccgtacagctgcgagaagacgacagaagggtacggctgcgagaagacgacagaagggtacggctgcgagaagacgacagaagggtacggctgcgagaagacgacagaagggtacggctgcgagaagacgacggaagggtacggctgcgagaagacgacagaaggatacggctgcgagaagacgacagaagggtacggcggcgagaagacgacagaaggatacggctgcgagaagacgacagaaggatacggctgcgagaagacgacagaagggtacggctgcgagaagacgacagaaggatacggctgcgagaagacgacagaagggtacggctgcgagaagacgacagaagggtacggctgcgagaagacgacagaaggg

SEQ ID NO: 18107 - DNA, 480 bp, Arabidopsis thaliana
  unsure at all n locations
  Clone ID: LIB35-032-Q1-E1-G3
ngttagctgccgtaccggtcnaaaattcangggtccaccnacncntccgtacggctgcaagaagacnacagaagggatggggaaaggagatgggtgtgaaatatggttgcccggtanaggatgtaataactggtttgacnattcagtgtcncggatggaaatcagcctacctgaacccggaaaagcaagcatttctcggggtagcgccnaccaatttgcatcaaatgctagtgcaccagaggagatggtcagagggagactttcagattatgctttcgaagtatagtccggtttggtatggaaaaggaaagatcagtttaggactgatacttggttactgttgctaatgtctttgggctcatcttcactaacctgtgctcaattactccgttttgacttcnctctgtctcctcaaaaggcattcctccgttccaaaaggccccaactcctggntaatcccnttggataactcactggttg

SEQ ID NO: 18108 - DNA, 491 bp, Arabidopsis thaliana
  unsure at all n locations
  Clone ID: LIB35-032-Q1-E1-G7
ctgtnccgcctgcctgtaaaggtccnaaattcccgggtccacccacncgtccgtacggctgcgagaagacagaagggtacggctgcgagaaacgacagaagggtacggctgcgagaagacgacagaagggtacggctgcnagaagacgacagaagggtacggctgcgagaagacgacagaagggacggacgattcgccatgttgggtgcagctggagctattgctcctgagattttaggaaaggctggtctgattccagcagagactgctcttccttggttccaaaccggtgtgattccaccagcagggacatacacttactgggcagacaattacacactctttgttctcnagatggctctgatgggattcgctgancaccggnaggttacaagactgntacaacccaatgattctatgggaaaaacagttccttcttgggggttaaaanaangggtttggccggttcaaggttaacccgggcnttaacc

SEQ ID NO: 18109 - DNA, 539 bp, Arabidopsis thaliana
  unsure at all n locations
  Clone ID: LIB35-032-Q1-E1-G10
ctgtttctgtttgncctgccngtaccanaccanaattcgcnggtcgacccacgcntccgcccacgcgtccgtacggctgcgagaagacgacagaagggggaaaaacagagagagggaacaacaaccaancactcatttctccacatcttgagagaaaaaaacagagcaagtatattagagatctcatggcgatggcggtctccggagctgtcctcagtgggcttggttcttcgttcctccaccggaggcatgagaggtgccaccgcattggcaagcggcgtaaggactggnagctcaganagttngcaggaanactcntattgtcgctgctgcggctgctcagcctaannaaatcttgggattcctgccngttaaaaggtggtgggcaacttcctttgaccctgaaatggctccaatggctccgctaancaaggaagaatttccgggtttcgaacccaatttgggtttttgggggaaaagaaccccngcttttttctggaaaatgggtaacaagacgaaggcttgangccttgaattca

SEQ ID NO: 18110 - DNA, 521 bp, Arabidopsis thaliana
  unsure at all n locations
  Clone ID: LIB35-032-Q1-E1-H5
gaactgttcgcctgcctgtaaaggtccnaaattcccgggtccacccacgcntccgcccacgcgtccgtacggctgcgagaagacgacagaagggcaagacgaagtgaggagtgtgataggtgacaaaggatatgtctctgaagaagacatacctaatctcccttacctaaaggcagtcatcaaggagtctcttcggctcgaaccagtcatccccattcttctacacagagaaactatcgcagacgcaaagatangtggctatgatattccggccaagaccatcattcacgtgaacgcatgggcggtttctcgtgacacagccgcgtggggagacaancctaaatgaattcattccaagagaaggttcantnnaccnaanccacanaaggagttggacctttaaaggggcccaancnttttgnngcctccttanncttttccgnggttcnngggccnggacnaattgtncccccgggccaatgcaatnctntggggaatttgcaaattggtntgaagattac

SEQ ID NO: 18111 - DNA, 403 bp, Arabidopsis thaliana
  Clone ID: LIB35-032-Q1-E1-H6
gttgagagaaaaacgttgaacgatgggagccggtaatggagaaacgccaaaacctacacagatttcaatttctaaagatcaattcctcgcttggaaacgccaaaaggatgctgagttattagccaaacaagctgaagcagcaaggaaacgacaagaggacatagcttcaggtcgtgttccaatgaatggtcgtgagcttttcttgcatgagccttgggttttcgacgatacccatcattgattctggtctattcactacttcctcataggtgatttaagacatttcctcgatgatttgtgatccaactctgtttctcttttgttgttgtactctcatgttcccacttttgtctcaagtgttaaatcagaaatttagtcctcagtaattgtgacttaatccttg

SEQ ID NO: 18112 - DNA, 417 bp, Arabidopsis thaliana
  unsure at all n locations
  Clone ID: LIB35-032-Q1-E1-H7
gtccaagagtagtggtgaaggtggatttgaagaagaagccatggcagcaggaccagccattgcacaatagatggcatccggagataccaccagcagcagaggtcaaggctggtgagtttttccgggtagaaatgattgatgcaatgggaggcgttatcaaagacaatgactctgcaagcgatatcaagaacctagtcctaactactggttgtagatgaggaaggtattgcagctaaagcaggtgattctccttgcctgttgacaatatgcaacnttggggtccctcttccaaggaagatgaaatgggggaattcactgggttccgttttgatanaagagaatgggttggccggnttccttgaactgaccaatttcccnttgtgccnaccaaannctatttggtactttgaagggatc

SEQ ID NO: 18113 - DNA, 401 bp, Arabidopsis thaliana
  unsure at all n locations
  Clone ID: LIB35-032-Q1-E1-H9
ggctgcnagaagacgacagaagggggtgtctccgttattaggtatttgtgagaatcttcttgattgactttatacttcagcgagattgtttatctctaagctccaggngaagctaattttgaattgcttctgggtttttagtacgtagctctctataagatatataacanatggttcgctccaangctcctgcaaagaagcagcagncagaaaggaattgatttcaagaaaattaagagaaagctcgggagaaaattaccaccaccaaagaatgcaaccaacactgagattaaatccaaagcaattatacttcctgagcanagtgtggctgctgaaaagagtggcttagctacaagtaanaaagacattcctgggatgaccactggggtgttttgggttgg

SEQ ID NO: 18114 - DNA, 493 bp, Arabidopsis thaliana
  unsure at all n locations
  Clone ID: LIB35-033-Q1-E1-A10
tgtttgnccggccctaccgganacgganattcccggctcgacccacgcgtcngtacagctgcgagaagacgacagaaggggggaatccagaggttttgtttctgaatggaaacaagtttttgggagttttgattgtgcctccaacaagtttcttggcatccaacaggaaggggatgcaaagaagtatgtgggtgttccgggcatgaactctatatctaaggccttgtgtaatgagtctggtgttaagagtatgtttggaactggtattgccaagatggaatggttggaagaagagataccatggttgttgacagattcaaaaggagaaaatttgggtcgtttcgatggagtggttgcatcaagataaaaacattgtttctccaaggtttactcaagtaactggactcccaccgcctctggacttaagtctagtcccggagttggcgactaagctgcaaaacattccctgttctaccatgcttctctcntaagc

SEQ ID NO: 18115 - DNA, 399 bp, Arabidopsis thaliana
  unsure at all n locations
  Clone ID: LIB35-033-Q1-E1-A11
atacgagaagagnnaggcganaacctcgccaatccgattacgcgaaaaatcaanggtttttggatatggcgtctaagcggatcttgggggaattganggatctccanaaggatccacctacatcatgtaccgcaggtcctgttgctgaagacatgtttcactggcaggcaacgataatgggtccttcagagagtccttatgctggaggtgttttccttgtaaccatccatttccctccggattacccattcaagcctcctaangtggcctttatgaccaacggtgttccatcccaacattaacaagnaacgggtagcatttgcctcgacatcttgaangagcantggagtcctgcctcancatttccaangtgctgctatccgatctgttcttttgnta

SEQ ID NO: 18116 - DNA, 497 bp, Arabidopsis thaliana
  unsure at all n locations
  Clone ID: LIB35-033-Q1-E1-A12
tgtttggccgggcctaccgnnacgganattcccgggtcgacccacgcgtcagaagacgacagaagggtacgactgcgagaagacgacagaagggtacggctgcgnnnnnnnnnnnnnnnnnnnnnnnnnnnnnnnnnnnnnnnnnnnnnnnnnnnnnnnnnnnnnnnnnnnnnnnnnnnnnnnnnnnnnnnnnnnnnntgccttcggagttaacaccagaagaacgatcggaactaaaaaactcaatcgccgagttccacacataccaactcgatccaggaagctgttcatcactccacgcgcaacgaatccacgcgcctccggaactcgtctggtcaatcgtacgacgattcgacaaaccacaaacatacaaacacttcatcaaatcctgctccgtcgaacaaaacttcgagatgcgcgtcggatgcacgcgcgacgtgatcgtcatcagtggattaccggcgaacacatcaacgggaaaaggctcgatatactcc

SEQ ID NO: 18117 - DNA, 394 bp, Arabidopsis thaliana
  unsure at all n locations
  Clone ID: LIB35-033-Q1-E1-A3
ctgcgagaagacgacagaagggtacggctgcgagaagacgacanaagggtacggctgcgagaagacgacagaagggtacggctgcganaagacgacagaagggtacggctgcgagaagacgacagaagggtacggctgcgagaagacgacagaagggtacggctgcgagaagacgacagaagggcacggctgcgagaagacgacagaanggtacggctgcgagaagacgacagaanggtacngctgcganaaagacgacagaagggtacngctgcnanaagacgacagaagggtacggctgcgagaagacgacagaacggtacggctgcccagaacacgacanaaagggggacccatttcttggcntacaacaacaaatcttaaaccttttact

SEQ ID NO: 18118 - DNA, 488 bp, Arabidopsis thaliana
  unsure at all n locations
  Clone ID: LIB35-033-Q1-E1-A5
gccctancaaatccggaaantcgcnggtcgacccacgcgtccgtacagctgcgagaagacgacagaagggggcagacgcagccatgggtatcgatcttatcgcaggaggtaagagtaagaagaccaaaaggactgctcctaagtccgatgatgtctacctaaagcttctcgtcaagctttaccggtttttggtgaggagatctaacagcaacttcaatgctgtgattctgaaaaggcttttcatgagcaaagtcaacaaagctcctctttcactctctaggcttgtanagttcatgactggcaaggatgacaagattgctgtgttggttggaactatcactgatgatttgagagttcatganattcctgccatgaaggttactgccttgaggtttactgagagggctagggctagaattgagaaagctggtggagagtgcttaaccttttgaccagctttgctctcagagntcccattggggacagaa

SEQ ID NO: 18119 - DNA, 471 bp, Arabidopsis thaliana
  unsure at all n locations
  Clone ID: LIB35-033-Q1-E1-B10
cgganatcccggctcgacccacgcgtcnatacagctgcgagaagacgacagaagggggtcgtgcgatacagttctgggtttgctgaagaagactctggaaaaaagttcatccatcacaattgattcgtgttcttggaacgaatctancgattcanacacatgaaacattcggtgaatcggcctccgacaccagatgaagacnatgtggcggatggtttcnagaaagacaangtcacgcttcgagaaatcatcaacgtcaagttggtggagagtggagagaatgagaatctaatggagcttgtgagagatagattggtggagtgtggttggaaagatgaagatgagaattgcttgcagggagcatgtnaagaagaaanggagaaaanatgttacagtcgatgaactgatccgantgatnactcctanaggnnagacttcagtaccaagattctgtgaanggcagactgtttg

SEQ ID NO: 18120 - DNA, 408 bp, Arabidopsis thaliana
  unsure at all n locations
  Clone ID: LIB35-033-Q1-E1-B12
agagattggagctagttggagatgggaataaggttcatattgatggtgaacaagcaaggccagactcgtcttgctcagtactacgaatggctcactctcgaggaacgtcgcgctctcgaaggcgaaatcgtccgtaaatgcctcgctcacaacgaccaacagtgttcgtttgtcgagcatcgcaactacaagatagtctacaggcgttacgcatctctcttcttcatggttggggttgatgacgatgaaaacgagctggcgattctagagttcatacatcttttggtcgagacaatggacaagcattttggaaatgtgtgtgagctanacataatgttccatctggagaaantcanttcatgctggaagaaatgggtgatgaatggttgcattgtggagacaagcaaa

SEQ ID NO: 18121 - DNA, 414 bp, Arabidopsis thaliana
  unsure at all n locations
  Clone ID: LIB35-033-Q1-E1-B8
agagtgtttctcccaatcgatcccggtgttgttcttctcgacattgctttcgtccccgacgaacctagccgagggtttttacttggaacgagacagactttgttagagactaaagatggtggaagcacttggaatccacgttcgattccttcagctgaagaagaagatttcaattatagattcaattcgattagctttaaaggcaaagaaggatggattattggcaaacctgcgattttattgtacactgctgatgctggagagaattgggataggattcctctaagttctcagcttcctggagatatggtgtttataaaagcgacagaagataagagtgcagagatggttactgatgaaggtgctatttatgttacttcaaacaggggatataactgggaaantgctattcaa

SEQ ID NO: 18122 - DNA, 411 bp, Arabidopsis thaliana
  Clone ID: LIB35-032-Q1-E1-D1
gatttagaaaaaaaggaagctccaagagatggcaagagttgttaaaatcgattctgcagagtcatggaatttctatgtgagtcaagccaagaatcagaattgtcccattgtggctcatttcactgcattatggtgtattccttctgtgtttatgaactccttcttcgaagagcttgcgtttaactataaggatgctctgtttctaatagttgatgttgatgaagttaaggaagtggcaagtcaactagaggtaaaggcgatgccaactttcttgttcttgaaggatggtaatgcgatggacaaactcgtgggcgcaaaccctgatgagattaagaaacgggtcgatggtttcgttcaatcctcacgtgttgttcatattgcttaagagagatttatagatacgagcagata

SEQ ID NO: 18123 - DNA, 492 bp, Arabidopsis thaliana
  unsure at all n locations
  Clone ID: LIB35-032-Q1-E1-D10
ttgtttgccctgcccgtaccgaaaccgaaaattcnccggtccacccacgcgtccgtacggctgcganaagacgacagaagggtacggctgcgagaagacgtcagaagggtacggctgcgagaagacgacagaagggcacggctgcgagaagacgacagaagggtacggctgcganaagacgacagaanggtacngctgcnagaagacgacagaagggtacggctgctagaagacgacagaagggtacggctgcgagaagacnacanaagggtacggctgcnagaagacgacagaagggtacngctgcgagaagacnacagaagggtacngctgcgagaagacgacagaagggtacggctgcgagaagactacagaatgggtacggctgcgagaanactacanaacggtacggctgcgacaagacnacagaanggtacngctgcnagaataccacataaaggtanngctgccagaaaactncccaaagggaaa

SEQ ID NO: 18124 - DNA, 418 bp, Arabidopsis thaliana
  unsure at all n locations
  Clone ID: LIB35-032-Q1-E1-C9
agaaggggggccgactcttactgacctcagagctcagcaaaaatggttcaacgtcttgtttaccgatcacgtcactcttacgccaccaagtccaaccaacaccgcatcgtcaaaactcctggtggaaaattgacttaccagacgacgaacaagagagctagtggacctaagtgccctgttactggcaagagaatccaagggattccgcatttgagacctgctgagtacaaaaggtcaaggttggcaaggaacgagaggacagtgaatcgtgcatatggtggtgttctatctggagttgctgttagggagangatcgtcagggccttcttggttgaaagaacaagaagattgtgaagaaaggtttgaaagcttcagaangngaaaagagaagactgcaccaaaagagtttgaagaaaac

SEQ ID NO: 18125 - DNA, 405 bp, Arabidopsis thaliana
  unsure at all n locations
  Clone ID: LIB35-032-Q1-E1-D3
gaacattggaccggtggttccatcgaagttcttggataaccggttgccagaagacaaagattacgaactcgagaactccaagacagagccagacgagtctgttttgaagtggttgggaaacaggccggcgaagtcggtggtttacgtggcgtttgggacattggtggctttgagcgaaaaacagatgaaggaaattgcaatggcgattagccaaaccggatatcacttcttgtggtctgttagagaatccgagagaagcaaactaccctctggttttatcgaanaggcagaggagaaagactctggacttgtggctaagtgggttcctcaactagaggttttagcacatgaatcaatcnggtgtttccctcacactgtggatgggaactccacattggaggcact

SEQ ID NO: 18126 - DNA, 365 bp, Arabidopsis thaliana
  unsure at all n locations
  Clone ID: LIB35-032-Q1-E1-D4
aagagatcgagagaagaatantttgatcatcntgtgagaaaaataatggctgcttcagtgatgctatcttcngtgacattgaaaccagctggtttcacngtggagaagacggcggctaaangattaccgtcnctcanaaaanctccgtccctccttcaaaattgtcnccaatggcgtcaagaaaatnaagaccgacaagcccntccgnantaacggcancatggacttgagggacggcgtcnacgcctccngcagaaaggcaanggatacgtgttacaatactcacaatatgagctactcatgatacatctattacacagacatggcaccaatgtgctntcaaggaagatcccgatggaatggcg

SEQ ID NO: 18127 - DNA, 389 bp, Arabidopsis thaliana
  unsure at all n locations
  Clone ID: LIB35-032-Q1-E1-D8
ttgaagcttctctctgcttatcgacacgatggttctcgaggcgactatgatatgtatcgacaactccgagtggatgcgaaacggagattactctccgtctaggttacaggcgcaaacggaagctgttaatcttctttgcggagccaaaacccagtcgaatccggagaatacggtggggattttgacaatggctgggcaaaggagttagagtattgactactcctacctctgatcttgggcaaaattctggcctgtatgcacggccttgatgtgggaaggagagatnaacttaaccgcagctatccagatngcccaactagctcttaaagcatcgccaaaacaaagaatcaacgccaaaaggattaatggttttgctggnaatccaatca

SEQ ID NO: 18128 - DNA, 382 bp, Arabidopsis thaliana
  unsure at all n locations
  Clone ID: LIB35-032-Q1-E1-D9
cttctcttgttcgaatcgctgtcgtcggagacatccatggcttctggaacctanatgaagatcgaaaggctctacnanttctccaggtgattttggtgaanaanacgtcccactggttcaaagtgttgccgctcttactttccctaaagcagtcatattggggaatcatgatgcctggttcacccaagattttccaaggaangaanancaaaaacaaaacggtgttcaaatgcaactcgatatccttggtgacgancatatangntatcancgcatggacttcccatcttttaagctcaagtagtgttggtggtcnacccttttcacatggtggggatcgaatgtttcggaaaaatctgcntgtccaaaggtatgngattca

SEQ ID NO: 18129 - DNA, 400 bp, Arabidopsis thaliana
  unsure at all n locations
  Clone ID: LIB35-032-Q1-E1-E10
aagacgacagaagggggaaggctctttgcctcaaagccatggaaattcttgttgaagagagtaatgttcagagagttgatgcccctgtcactttatgtggtgacatccatgggcagttctatgatatgatggagcttttcaaagttgggggtgattgtcctaagaccaactatttgtttangggagattttgttgatcgtggatattattcggttgacacatttctacttcgactcgcactcaatgtcagatatccaaancgcatnnctctcatcagaggaaaccatgaaagcangcaaatcacacaggtttatggattttatgatgantgtttncctaaatatggctcctcaaatgtctggaganactgcaccgncatttttgactacatgantccttc

SEQ ID NO: 18130 - DNA, 388 bp, Arabidopsis thaliana
  unsure at all n locations
  Clone ID: LIB35-032-Q1-E1-E12
agaaggggaattcagacacctgactcgtcttctcatcctacccccaattcaatattcgtcgccaatatgccgcaaagacactcgangaacaacaatgatcttgcgtatttcacttacgacgagaagaagaagttaggttatggaactcagagagagagtgattggggagagactcgatcaaaccctttgatgcttgttctctctgcttgaagcctttcattgatccgatgtgttgccataagggtcatgtcttttgcagagagtgtanacttgaatgtttccctgctcagaanaaaagatatccaaaaggaggcttgctgcacattcgtctcaaaagaagcaccgataangatgannaagaagagangctaatgttacaaanaggcga

SEQ ID NO: 18131 - DNA, 417 bp, Arabidopsis thaliana
  unsure at all n locations
  Clone ID: LIB35-032-Q1-E1-E5
aaggttgagttagagctttctaacatatgcattgatattatgtctgtcttagacgagcatctcattccttcggcttccgagggtgaatctactgtcttcttcaacaagatgaaaggtgactattaccgctatcttgctgagttcaaatcagggaacgagaggaaagaggctgctgatcagtctttgaaagcctatgagattgctactactgctgctgaggctaagctccctccancacaccctatcagattgggtttggcttcgaatttctctgtcttctactacgagatcatgaacgcacctgaaagggcatgtcactttgctaagcangcgttcgaatgaagcctaatctcnnaagcttgacactcctgaanccanggaatcctacnaaggataagcacctttaataatggcaac

SEQ ID NO: 18132 - DNA, 405 bp, Arabidopsis thaliana
  unsure at all n locations
  Clone ID: LIB35-032-Q1-E1-E6
gaatctctttattgggattgcaatttcannnnnnnnnnnnnnnnnnnnnnnnnnnnnnnnnnnnnnnnnnnnnnnnnnnnnnnnnnnnnnnnnnnnnnnnnnnnnnnnnnnncggagacgattttgtgatttcaccattagtctctatcaccaggggtttttggacgatcaattcacagaattgaaaaagctgcaagatgaatgtagtcctgattttgtggctgaggttgttactctcttctttgaagactgtgagaagcttatcagtaatatggctagagctttagatcagacnggaaatgtagatttcaaactgggtangttcctagttgttcatcaactcananggtagtaccctcaagtgttggtgccaannagagtcaannggtccttgtgttaccctca

SEQ ID NO: 18133 - DNA, 418 bp, Arabidopsis thaliana
  unsure at all n locations
  Clone ID: LIB35-032-Q1-E1-E8
ccatatctcacgcttaattacagtattgccactcattaaaaccgtaccatcttaaccaaagcgataacccgtaccaccggttcagctatggaggatttattggaggagaggctaactcggactgactctgtcgggaataaacgagtcanagacgggttaaacctcnactcnccggacgtttaaaccggttaagaaatgatttgttcnatgactccggggcttgacccagtgaagtcaaagattcttgacccggtgatnaaaaanttccaagaatgaatttatccacaaccaacnggcnggcgcctaancctnccgttgaaacncggccggatttttgggtnaccttttcnaaaccttctgatgaacaacctgggtttgccaacggccgcttaagccaacggaaaacgccttcttctnc

SEQ ID NO: 18134 - DNA, 467 bp, Arabidopsis thaliana
  unsure at all n locations
  Clone ID: LIB35-032-Q1-E1-E9
tttagcctgccgtaccganccaaaattcgcgggtcnacccacgcgtccgtacggctgcgagaagacgacagaaggggaccgattcgagagtagcaatggggattctatcatggntcacgggaagtcctaagccatcacagtccgagacgtctaagccggagatgattcagatgccgaaatcaganactccagccccggggatgaatggngccatanaagttcctcggcccgatcgcgcgacggttttcgagttcggctccgttgctgcnactggngacagngtcactctcgctggttactgtccngtttccgatgatctcgaaccttgccgttgggagattcttcccgccgacggcaaanacnctccacaagtttcgcttcatcttcngangaatcantcanataatcngtagaacaatgtaaacttgttcanncctcgtcgcatgaaaaatggtcttggnctggta

SEQ ID NO: 18135 - DNA, 394 bp, Arabidopsis thaliana
  unsure at all n locations
  Clone ID: LIB35-032-Q1-E1-F11
aagacgacagaagggaaaggaattcccttctagtaaggcttctgcatgtacatgaacatatcctgtagcggaaacatctgattactactccctcctcctccaaacgcgttatccacggtggcatcaatgtaattaaacccaaaatcaagggtattgttattgtcattacttacggccgaccaatctttccacttgggcccgctctgaacctcgctcgtgaactccggcgacaccacctgctccgagcaactcgaatccgtagtatgcaacttcggcaccgaatccgacgtgtcgaaatacgcgaactcacttgtctgttgcggcggcggagnataancatctccgtcancttcggcttctcctctcacatggntctacctanccaacaaaaccg

SEQ ID NO: 18136 - DNA, 381 bp, Arabidopsis thaliana
  unsure at all n locations
  Clone ID: LIB35-032-Q1-E1-F12
ctctcatccttcgcttcttcgaattccaaaagtagaacagtataagaaatcatggatncacctgaaatgaaatatttggnacaanaggatggtccgttgatgaagacaatcaaaggtacgtatcactggttttggtgctgggactatttacggnaccattttagccacatgggnaagatgttccaaaaagtgggngagaaatgtggctcttccaaggacttattagaacactgaangatgatggggaacccatgggctgacttttgctgcnataggaagtgtttacatcggtgttgaacaagctggntcagaattttagattcaangagagatttttacaatgggtgcnattgggggtttttgtcgctgggagcctcngtg

SEQ ID NO: 18137 - DNA, 519 bp, Arabidopsis thaliana
  unsure at all n locations
  Clone ID: LIB35-032-Q1-E1-G1
ctgtttacgcctnccggtaggcctccgaaaattccanggtcnacccacgcgtccgcccacgcgtccgtacggctgcgaagaagacgacagaagggggttctaggtggattcttaagaaaaagaaggaaacgaaaacagaggaataacaatggcagggagaataagctgctgtctaaatcttcctcccctagattcaaattctgcacaatcattagcttcactgctcaagacaacgtcaaagatctcttgtaggagaacagaaaatgagacagagccacggaaaaacaagtgttcttttgtcctgggggttggccngcanactgtcntaaatcggtcnggattcaagattaatgatgttgcatcacttggaaactgccggttgttgaaaatccccccggttanaaaanaaaatggcttgccnggttgtttgttgccgcccgccggaaggttgganttgacaaagaaggacgttttccgcccttggcttgannaactcccctagaagaacaaccgtnaccg

SEQ ID NO: 18138 - DNA, 425 bp, Arabidopsis thaliana
  unsure at all n locations
  Clone ID: LIB35-030-Q1-E1-D9
gcntccgtacggctgcgagaagacgacagaagggatattagctcagctgaatttggagacagggataccgatttacgaagcagagccattgcttctcttcttcatcttgttcactctgttgggagccattggagctctcggagacagaggaaaattcgtcgacgatcctcccaccgggctcgagaaagccgtcattcctcccggcaaaacgtccgatctgccctcggtctcaaagaacaaggtccattgtttgggttcacgaaggcgaacgagttattcgtaggaagattggcacagttgggaatagcattttcactgataggagagattattaccgggaaaggagcattagctcaactcaacattgagaccggtataccaattcaagatatcgaaccacttgtcctcttaaacgttgctttctt

SEQ ID NO: 18139 - DNA, 417 bp, Arabidopsis thaliana
  unsure at all n locations
  Clone ID: LIB35-030-Q1-E1-E3
gaaaacgagagaagaagaacattggaagagattttgtatgcattggtggttcaaaagttcatggaagctaacgtatcacttgtaccttcagtaagcccatcttcagatccgtctggtcaggttgatacttggccgaccaaagtggagaaactcgagcggcttcactcgcccgagatgtacgagatgattcacaaccatcttgccttgattcttggaagcagaatgggtgatctgaactctgttgcacagataagcaagctcangagttggccaagtttacgctgcttctgtgatgtatggatatttcttgaagagggtggaccnaaagtttcaagcttgagaagaccangaanattccttccggggtgggtcggatgaaagtanaacangcccatgtagatgcgangtaccactttg

SEQ ID NO: 18140 - DNA, 399 bp, Arabidopsis thaliana
  unsure at all n locations
  Clone ID: LIB35-030-Q1-E1-F11
ggctgcgagaagacgacagaaggggacaacaaacacaaaaatcaaaaggggtcatttactatcttttaagagacgacatatatagttctcgaccaagaaaagaaaagggggtgacctgagctcttcaacacataacataatggccggagttttcaaaacggttacgtttcttgttttggttttcgctgccgttgttgtcttcgcggaggactacgatgttggtgatgatacggaatggacgaagactatggacccccgagttctatactacttgggctaccggtaaaacttcccgttgttaggcgaacaagcccnaatttgatttcnctgctggggaaggaataatttggcaanttgtnatcagaacctgcatttgaaaccgtgagaaaagagaaaccc

SEQ ID NO: 18141 - DNA, 409 bp, Arabidopsis thaliana
  unsure at all n locations
  Clone ID: LIB35-030-Q1-E1-D7
ggaagaacccgtaatggagcgtgtcgttgagtcgggtcgtgagctacgagaaaagatgcgcgagaaactgcacaaggagaattgcatggatcgagttgcccaggatccggatcagaatttgggcgaggctcctgatgtcgggtgggtatctgacctgctcatgtaaagaaaaaaatctgaccgtatttcgaagtctcattggcttttttggatatcttccaaggaaaagaggaagggatcttagtgtgttcatattattttatttactaatctcgtattttatctgctaataagaattaattatggattttggggcctgatttttctaagatgatcgttgtatagatgtgccttagggttttanntatganatactattaatataatcgtgttttatangactataatg

SEQ ID NO: 18142 - DNA, 469 bp, Arabidopsis thaliana
  unsure at all n locations
  Clone ID: LIB35-030-Q1-E1-F5
ttcccgggnccacccacgcntccgtacggagaanacgacagaangggaggaaananaannaaaccaaagcaaaaaaatggctttgaaactcacttctccgccttcagttttctcacaatcaaggagatcatctccttcttcgttaattccgataaggtcaaaatccacattcaccggatttcgatcgagaaccggtgtttatttaagcaaaacgacggcgcttcagtcgtctanaaaactgagtgtggcngcggagagtcctgcggcgacaattgcggcggatgattgggggaaagtatcggcggttctgtttgatatggacggcgtgctttgtaacagtgaanatctttctanacgcgccgccgttggatgtttntacggagatgggaattgaagtcactgtggacnaattccgttccttttaangggaaacangtgaagccnaactntttagggaaggtgttgcttc

SEQ ID NO: 18143 - DNA, 408 bp, Arabidopsis thaliana
  unsure at all n locations
  Clone ID: LIB35-030-Q1-E1-F6
agcacaacaacatttccaagaaatggaaattctcgaagggagaactcagttgatgattctgacccgcccggggatagatatagagatgcttggcaacatgggatccaaaggaggcaaaattttggacggcctttagggagaagagattaatttataattccaactggtcctgaacatcatacactggtggagatactatgttacttgagatctcagagcatccgacctagctcatggtttcacagggtcaataccacgaaagggtgactcgaantcatgaactgttgaaaagaggaatgcntgaaggctgtgtacgtcaaaggggtaacatgctcacctgatttgtgctggcgaaagatgattcatgcctattctttcaaggaactggcgctcttctgctccagatnc

SEQ ID NO: 18144 - DNA, 89 bp, Arabidopsis thaliana
  Clone ID: LIB35-030-Q1-E1-F7
gcaaggcttgctgatacttcggatggcgaaatggatggagatccaccatattcgcatgatcatccaatgccacagggatgagagaaaag

SEQ ID NO: 18145 - DNA, 397 bp, Arabidopsis thaliana
  unsure at all n locations
  Clone ID: LIB35-030-Q1-E1-G12
acnacagaagggtacngctgcnataagacnacanaagggtacggctgcgagaagacnacataagggtacngctgcgagaagacgacanaagggtacggctgcgagaagacnacagaagggtacggctgcgagaagacgacanaagggtacngctgcgagaagacnacagaaggggatccaagaaaaaaataaacagaattgcatgatcaaaacactctgtttcattcctctgttttttgctctgttttgctctcacgccataacgtgttctgcttacagtttcgacttcaagttacttcggaaatggaactgatctgatgacattccatggagacgccgantacgcttcanagcctgatggtatgancangtcaggagcaattggnttgagccgtta

SEQ ID NO: 18146 - DNA, 382 bp, Arabidopsis thaliana
  unsure at all n locations
  Clone ID: LIB35-030-Q1-E1-G3
ccaaaaaaaacagaagaataagaagacacaactcttgttttaaatttgagtcccatttacttttgatgctaaataggagagaaaacgtttttgactcacacataacgtagagagacagagagagacaaaaaaaaagagacgggaatattccggcgaagattgagactctcaatatccaatggagaagtattcccggcggtctattctcctttccacggtggtcgccgccgtgttattctctttaattccggtttcaatctctattcccttcatactctttcacgttaatattaattatccaaaaaaaaaagaaaacaggaattggagataaatgttctggtggagttantaacttcacgcaactcctaaacaanctctcctg

SEQ ID NO: 18147 - DNA, 418 bp, Arabidopsis thaliana
  unsure at all n locations
  Clone ID: LIB35-030-Q1-E1-G8
ggaatgatggaatcttcagctttaataaatctgcagactctcanaattccgattcatcttattgaanaacaattttccggcgaaacagccgatgaantctcgcctgaatcttctgtncctttcaccggtgattgacttcacttcagaatcgagananaagaaatcgatggnaaactaangaatagaacgagtttcanattctcgctctctcntcanaaccgcaaatcannggaacgaagaggcgagagagagagatgagtaaacggaatccnaaggattctgaaagatttttctgtatatgttacttctcaactctctctttctnatcatctacttcgtttttcactcancgtcggtttcaccggnagcagtcacagnctccgtcatanagaccacgtttcaagtgaanaaccaatcg

SEQ ID NO: 18148 - DNA, 390 bp, Arabidopsis thaliana
  Clone ID: LIB35-030-Q1-E1-H10
taccgactactttcagtgttctcttcttctccactaattcagatcacattcaagaatcttcttcactcacatctctgaaaaaatggcgagcaacatggaagttttctgtgagatcttaatcgcgatccttcttccacctcttggagtttgtctcaaacgtggctgttgcactgtagagttcttgatttgcttggtgctgacaatcttaggatacatcccagggataatttatgcactatacgtgatcgtgtttcaaaaccgtgaaggctctaccgaacttggagctccacttaactcagcttgatctgttttggtccattacacggatcaatatgttgttgaaactgttttacttatcatgtaccaaataataagttgctttgcaatttt

SEQ ID NO: 18149 - DNA, 413 bp, Arabidopsis thaliana
  unsure at all n locations
  Clone ID: LIB35-030-Q1-E1-H3
gttttctactttgcaatttagataaatctttctatccactttgagaataaattaagggctctcaatttcgaattctgcttctccaacgaaaaaaacgaaatctttaatggcgaagaaaggaggagcgacgctagctgaggatgcaccatggcgagtttcgtcaggaagaccagtgcctaagatcagtcgctctccggttttatctatctctcaaaacccagaaaccgattacgccatttccgtcatgaagcatccgaatcctgtgggaggtgggtttgcgatggaagctgtacttgaatccgcagganctgaatgcgttgttcctggccaantaacacctcttcggttacttggtgttaaggtgtngcctgttganntgatcntaaattcttggaaccaangggaaaaggagc

SEQ ID NO: 18150 - DNA, 411 bp, Arabidopsis thaliana
  unsure at all n locations
  Clone ID: LIB35-030-Q1-E1-H6
accagaaaagcgaggaagaagtacaagaacgagcacagcgagccgccgcagcagccaggagatggagggaatactcacgaagaggcgtggataagcgccccaccttcaaactcccagactccgcctccagaggagacaactgaaaccataggcagaaatcacttatagtttatataggtaagcaggtttcttactagattatatatctatatatgtaaatgtcatgtcgcgttctagacctgtatagctttgttctcacatcgattaaggaagaaaanaacaagtgtatttaacgttttcgatttctgtattatactatttaaaaaaaaagtttgcaacgcctagatnaaattaaaatacattagntatgtnaaaaagacagnnnntgcntaaanaaaagcgggccgctct

SEQ ID NO: 18151 - DNA, 413 bp, Arabidopsis thaliana
  unsure at all n locations
  Clone ID: LIB35-031-Q1-E1-A1
ggctgcgagaagacgacagaagggtacggctgcgagaagacgacagaagggtacggctgcgagaagacgacagaagggtacggctgcgagaagacgacagaagggtacggctgcgagaagacgacagaagggggaaacagatctttcgtataatcagtgacgtagagatcnaanacgatgatgagctctgcatccgccatgaaagctgttggatttttgcttctgcttaccattctaacattagcttatgcgaagaaatcangtgatgtgacanattgcagattggtgttaagtacaagcctcagaaatgtgatctccaagctcacaaaggggataagatnaaaggtcactatcgggggaantttactgatggaactgtctttgattcaantttgagaaaagtgaccnaattg

SEQ ID NO: 18152 - DNA, 396 bp, Arabidopsis thaliana
  unsure at all n locations
  Clone ID: LIB35-031-Q1-E1-A10
ggctgcgagaagacgacagaagggtacggctgcgagaagacgacagaagggtacggctgcggggctgcgagaagacgacagaagggtacggctgcgagaagacgacagaagggcactcaccaaactgatcctcgaagacttcttgatcttgaagggcccttgcccaaactgtggaacagagaatgtatctttctttggaacgatactatccatccccnaatgatagtaacaccaacaatgtcaaatgctcaggctgtggaacggagatggtctatgactcaagttctcgtttgatcacattaccanaaggagggaaagcttaaatctaagagccaanggttatgtnnaagtgtatgttaaattaatactaacaaatgaagaaagtggngaaatcca

SEQ ID NO: 18153 - DNA, 418 bp, Arabidopsis thaliana
  unsure at all n locations
  Clone ID: LIB35-031-Q1-E1-A8
aagacgacagaagggggggaagttgaaaatatgaaaattgtaaatggcactgtaatgttgtgtgggaatctgaatgcanatgaagctacgcangcgacacctgagcctaataatgcananccgtatccagactatancctggtggtcacanagagggaaacaatcatggaggttgatgagccggatccagatgatcaanaaatccagaggatccaagactctgttaccatcatctctaaccgtctcaagaaagccataaaggccttgagaaatgaaatcaaccccggtcaagcaaccactgtgttacaaatgcttctcaaaatagtcaggaacatcattgaacanncaaatganatganattcaaaaggctgcttagggaaatctgcanntaagcgcaacantctcaactttccagcc

SEQ ID NO: 18154 - DNA, 409 bp, Arabidopsis thaliana
  unsure at all n locations
  Clone ID: LIB35-031-Q1-E1-B12
gcgtccgtacggctgcgagaagacgacagaaggggactgaaagaaaaaaatgaacaaactctccaacgctttctctgtcctggctttcgccgatgaagatgctccaatggcttcttcttcttccactgggaaacaagaagaaagtgtaaatgggtcacttgaggatggagattacaagcaaccacttgtttggattgacttggaaatgactggattaaatgttgaagttgacaggatattggagattgcatgtataattactaatggagatttaacacaatcagtggagggtccagatttagttgtacgtcaaacgaaagactgtttggataaaatggatgactggtgtcaaactcatcatggagctagtgggttgacgaagaaagtgctcctcantgcgataactgaa

SEQ ID NO: 18155 - DNA, 397 bp, Arabidopsis thaliana
  unsure at all n locations
  Clone ID: LIB35-029-Q1-E1-G2
aaaagaaaaaagcctagaggaatagaannnnnnnnnnnnnnnnnnnnnnnnnnnnnnnnnnnnnnnnnnnnnnnnnnnnnnnnnnnnnngataagaatcaatggccaaggaattagcagataaagctaaanaagcttttctagatgatgacttcggtgttgctgttgacttatantccaaagccattgacttgngatcccaattgcgccnccttcttcnccgatnttgctcaggccaacatcancatcgataacttcactgaagctgttgtagatgcgatcaacagccattgngttgggangcaacgttggcaaangcctaatctcagaaagggcactgcttgtantgaaagctagaagagttanaagnantgctaaagcaaccctgggaanaatgg

SEQ ID NO: 18156 - DNA, 320 bp, Arabidopsis thaliana
  unsure at all n locations
  Clone ID: LIB35-029-Q1-E1-H10
ggctggcganaaggacgacagaaggggntgtcaaagcgacacaaggacgaattcctgtcttcttggatggtggtgttcgacgtggcactgatgtcttcanagcacttgcacttggngcctccgggatatttattgccagaccactggtattcttattggnagctgaagggaganggctggantttanaaaagggtgcttcaantgctaccgtgatgagttcnacctgaccattgcactgaagtggggtgtcnggtccctaagaggnaaatctcccgtanccanatttaccaaccgaatggggaaacgtccacntccttca

SEQ ID NO: 18157 - DNA, 380 bp, Arabidopsis thaliana
  Clone ID: LIB35-029-Q1-E1-G11
ggtcgcagtgaccaggcccgggcgactgtttaccaaaaacacaggtctccgcaaagtcgtaagaccatgtatgggggctgacgcctgcccagtgccggaaggttaaggaagttggtgacctgatgacaggggagccggcggccgaagccccggtgaacagcggccgtaacaataacggtcctaaggtagcgaaattccttgtcgggtaagttccgacccgcacgaaaggcgtaacgatctgggcactgtctcggagaagaggctcggtgaaatagacatgtctgtatggacgacgatcctgtgcgcagaggaaagccatctaaccacactgtctacggctctgggcatgggcattctcgccgggtgacgccctcctccca

SEQ ID NO: 18158 - DNA, 386 bp, Arabidopsis thaliana
  unsure at all n locations
  Clone ID: LIB35-029-Q1-E1-H6
ccatttcttggcttacaacaacagatcttaaacgttttactttgtgctgcactactcaacctcaatggncgcctcaacaatggctctctcctcncctgncttcgccggtaaggccgtcaagctttcccccgcngcatctgaagtccttggnacacggtcgtgtgacaatgaggaagactgttgccaacccaancggcccatcaggcagccatgntacggatctgcccgtgtcaagtacttgggtccattctctggcgaatcancgagctaccttacnggganagntccccgganactacgggattgggacaccgcccggactttcagcttgaccccgagacattcgnaangaaccgttgaactngaaagttatccacagcaaggtg

SEQ ID NO: 18159 - DNA, 419 bp, Arabidopsis thaliana
  unsure at all n locations
  Clone ID: LIB35-030-Q1-E1-A11
gcatccgtacggctgcgaacgacagaaggggaaggaggattcgataaaatggctccaagatccgattcgcaaaccggctccagtgtatcagacggttcagatcaatcctcaatggntccaatattccaccttctccgaatcgtcccattctcatttctccgaccaccgcgcctccgtctgaagattccatcgttcacgcttccttctccgatgactgtatacgctctaattctccttacctactttttactagtctccggtttcgtctacgacgtaattgtcgagcctccgggtatcggntcaactcangatccgactactggnactattccgacccgttgtgtttatgtcgggtcgggttaacggggcantatatcattganggtctctcttctggattcatgttcggttctcggtgg

SEQ ID NO: 18160 - DNA, 361 bp, Arabidopsis thaliana
  unsure at all n locations
  Clone ID: LIB35-030-Q1-E1-A12
cgacagaagggtctcatggagagttcgatcctggctcaggatgaacgctggcggcatgcttaacacatgcaagtcggacgggaantggtgtttccantggcggacgggtgantaacgcgtaagaacctgcccttgggaggggaacaacagctggaaacggctgctaataccccgtaggctgaggagcaaaaggaggaatccgcccgaggaggggctcgcgtctgattagctagttggtgaggcaatagcttaccagggngattatcagtatctggtccgagaggattatcanccacactgngactgagacacggcccagactcctacgnggangcaacagtggggaattttccncagtggg

SEQ ID NO: 18161 - DNA, 492 bp, Arabidopsis thaliana
  unsure at all n locations
  Clone ID: LIB35-030-Q1-E1-A3
tacntttccgtgcccgtccgaanattaaagggtccacncacgcgtccggntgcgaaaacgacagaagggggggataagttttctaaaaaatcgaagaaagatcgatggctctagatatctgcgtgaaggttgccgtcggtgctcctgatgttctcggcgactgtccgtttagccaacgtgctcttctgacacttgaggagaagaagcttccctacaagacccatctgattaacgtctccgacaaaccccaatggttcttagacattagtccagaggggaaagttccggtggtgaagcttgatggcaaatgggtggctgattctgacgtaattgttggacttcttgaagagaaatatccangagccttctctcaagactcctcctgaatttgctctgtaggatncaaaatccttggtgctttgtgaccttcntgaaagancaaaagacgctaatgacgggttccganaangctttggtgatgaattagaaccn

SEQ ID NO: 18162 - DNA, 412 bp, Arabidopsis thaliana
  unsure at all n locations
  Clone ID: LIB35-030-Q1-E1-A4
ggaagcgaattttctgactaagtatggatctaaggtttatattattcataggagggatacgtttagggcgtctaanattatgcagcagagagctttgtctaaccctaagattgaagtgatttggaaccctgccgtggttgaggcgtatggtgatgaaaatggacgtgttcttggaggattgaaggtgaagaatgttgttactggggatgtttcagatctgaangtgtctggattgttctttgctattggtcatgagccagctacgaagtttttggatgggcagcttgagcttgatgaacatggttatgttgtgaccaagccaggtactactaagacgagcgtggttggtgtatttgctgctggagatgttcaagacaannaagtatanacaggccatcactgctgcangaac

SEQ ID NO: 18163 - DNA, 457 bp, Arabidopsis thaliana
  unsure at all n locations
  Clone ID: LIB35-030-Q1-E1-B11
gcatccgtacggctgcgagaaacgacagaagggtactgctgcgagaagacgacagaagggtacggctgcgagaagacgacagaagggtacggctgcgagaagacgacagaagggtacggctgcganaagacgacagaagggtacggctgcgagaagacgacagaagggtacggctgcnanaagacgacagaaggggatccaaaanaacaaaacannaaattatattcaagagaaaaaggaaaaaatgaatttcatctccgattaaggtnaaagaaaactctcaagctcaacaacaagaggagccagaacacnancaagncaagtcnaagggaancgaaacaancttccnagaccaacctncccaacgcccnagcctcntgggcaagtttcccaanggttngtaacttaaanctgctcnaacccgcaanctccttaacgaatnccagcttaaacctcc

SEQ ID NO: 18164 - DNA, 369 bp, Arabidopsis thaliana
  unsure at all n locations
  Clone ID: LIB35-030-Q1-E1-B5
atcaacgctcgtgcacgccaangtcttgtcaacggaggtggaatcattganacntgtttctggcccgggaagtatncattagagctaagttcagccgtctatggtaaactatggaggtttgaccagnaaaggcttacccgcggatctcatcaaaagggggttggctgangaagataagaccacagancatggagtacgtctgacgataccanactatccatttgcaaatgatggtccaatattgtgggatgcaantaaagaatgggtgacagactatgtgaaacattactatcctgatgannaactgatnacatcgggcatganttcaaagggatggtggagtganttgcggaacatagccacgganac

SEQ ID NO: 18165 - DNA, 423 bp, Arabidopsis thaliana
  Clone ID: LIB35-030-Q1-E1-C10
gcgtccgtacggctgcgagaagacgacagaaggggccctcttcgctgctcctgccagcgttaataataataactctgttccggcaaaaaatggaggttacacagttggggatttcatgactccgagacagaatttgcacgttgttaagccctctacgtcggtcgatgatgcgttggaacttctggttgagaagaaagtcacgggattgcctgtaattgacgataattggacactggttggtgttgtttctgattacgatttgcttgcattggactccatctctggtcgcagtcaaaatgatacaaacttgttccctgatgtcgacagtacctggaaaacgtttaacgaactacagaaactgatcagtaagacatatggaaaagttgttggagactgatgacaccgtctcctctcgttgtccgt

SEQ ID NO: 18166 - DNA, 463 bp, Arabidopsis thaliana
  unsure at all n locations
  Clone ID: LIB35-030-Q1-E1-C12
tgccccnccagtacaagtcaaaattcccgggtcgacccacgcgtccgctgcgaaaagacgacagaaggggactgacgatacaaactcgacgaagcaatgtggtctcttgcnctaacgttaccatctccgtctttggtgtcngtgangagtactanactcggncgaagtgttattaatggtggccggaattggtcaggacttactaagttgtcngagaaatcgangactaaacgaggtaatggtcnctgctgcaaggcggagctgtcngagctanctccagtcgtctctgctacttatggtgtacttcttctaagacgcggtctcttcgcttatagcaaatctggaagcanaggttctctctttgggggtttgaccgggttctgttcttatggcatctgcctacttccttactaaatcaccagagacangagttctcngcgataccatangtcttggtgctgcc

SEQ ID NO: 18167 - DNA, 393 bp, Arabidopsis thaliana
  unsure at all n locations
  Clone ID: LIB35-030-Q1-E1-C7
gctgcgtcagtaaancgtattcntaaaancanccattggtgtgattgactctataagagaattcgtcagcgtgaagcaatctccaatctaatcgcagcatatcttctccgattcctattcgtctctgcaattgaatcttccggtaggcgaagatggcgacgtctgcgaggatttgttgcggaggaggaagtgcatgcnccgttcgttgtgatcgtcgcacgtnaaatttgaattctcgatcgtcatgtgttgttccaagtgacgaatcgacggaatatgtgtgcgatcgggaagatttcgantgtcgatggangatttgtcaccaccgtctgcnncggtgaangattnanangattggtggaacgaaacccggtggatctgtngtgtccaggg

SEQ ID NO: 18168 - DNA, 424 bp, Arabidopsis thaliana
  Clone ID: LIB35-030-Q1-E1-C9
gcgtccgtacggctgcgagaagacgacagaaggggccctcttcgctgctcctgccagcgttaataataataactctgttccggcaaaaaatggaggttacacagttggggatttcatgactccgagacagaatttgcacgttgttaagccctctacgtcggtcgatgatgcgttggaacttctggttgagaagaaagtcacgggattgcctgtaattgacgataattggacactggttggtgttgtttctgattacgatttgcttgcattggactccatctctggtcgcagtcaaaatgatacaaacttgttccctgatgtcgacagtacctggaaaacgtttaacgaactacagaaactgatcagtaagacatatggaaaagttgttggagacttgatgacaccgtctcctctcgttgtccgt

SEQ ID NO: 18169 - DNA, 497 bp, Arabidopsis thaliana
  unsure at all n locations
  Clone ID: LIB35-030-Q1-E1-D3
tacgtttgcccgtgcccggtccgaanattaangggtcgacgcacgcgtccgcccacgcatccgcccacgcgtccgtacggctgcgagaagacgacagaaggggaagaagagaagaagaagaaccttacaattgcttttgtaaatattgtangtagtttaaggacgtcactacctacatacatggatttatgtggaactcagatgctgcgcctctcatcgcctcatttcaaaacccttcatttggttagtcttgcatttatttatccatttcaatcttgatcgcatggaaaatgctancaatctcgatctcatggaacattttcacgtgaggcatgcacaaggagtccacaatatagcattagaagagaagggagagaaacctgaatcagaaaanctttttgacgcccanctttctccaaaggggtctgcaacaggtttcggaaaggcgcanccaaatccttgnatcacggattacttaacactgtcgagtnagtgat

SEQ ID NO: 18170 - DNA, 289 bp, Arabidopsis thaliana
  unsure at all n locations
  Clone ID: LIB35-030-Q1-E1-D4
cctcacaagattcaagggatangacctggttttataccaagtgtnttgaatgttgatcttattgacgaagttgttcangtttcaagtgatgaatccattgacatggcaaggcancttgctcttaaagaaggtcttcttgtgggaatatcatccggtgcagcagctgctgcancaattaaacttgcacagaggccanaaaacgctgggaagctanttgtagcgatattccccnnagtttctgngaanaggtatctatcaacggtacttttcgattccgacgcggaaacaa

SEQ ID NO: 18171 - DNA, 422 bp, Arabidopsis thaliana
  unsure at all n locations
  Clone ID: LIB35-028-Q1-E1-H2
aggcaatcaaaaaaatatggctgcgtctcccaagataggcatcggtattgnnnnnnnnnnnnnnnnnnnnnnnnnnnnnnnnnnnnnnnnnnnnnnnnnnnnnnnnnnnnnnnnnnnnnnnnnnnnnnnnnnnnnnnnnnnnnnnnnnnnnnnnnnnnnnnnnnnnngtcaaccaacccgaactcgctcttctgattccctccgcctcagagtctccgccaccgccaattctccgtcttcttcttcttcaggaggcgagattatcgagaatgtagtgattataggctccggtcccgccggttatacggcggcgatatatgcagcgcgcgccaatttgaagccggtggtttttgaagggtatcagatgggcggagttcccggtggacaattgatgacaactactgaagttgagaantttccgg

SEQ ID NO: 18172 - DNA, 418 bp, Arabidopsis thaliana
  Clone ID: LIB35-028-Q1-E1-H5
actttgttcatctaaaaactcctcctttcatttccaaacaaaaacttctttttattctcacatcttaaagatctctctcatggcgatgtctttctcaggagctgttctcactggtatgacttcttctttccacagcggagccaagcagagcagcttcggcgctgtcagagtcggccagaaaactcagttcgtcgtcgtttctcaacgcaagaagtcgttgatctacgccgctaaaggtgacggcaacatcctcgatgacctcaacgaggccacaaagaaagcttcagatttcgtgacggataaaacaaaagaggcattagcagatggtgagaaagcgaaagactacgttgttgaaaaaaacagtgaaaccgcaagatacattgggtaaagaagctgagaaagctgcggcgtatgtgga

SEQ ID NO: 18173 - DNA, 421 bp, Arabidopsis thaliana
  unsure at all n locations
  Clone ID: LIB35-028-Q1-E1-H8
attgcaaaaagaaaaccaaaacaaagctcaatcatggctagtcggagagaagtacggtgccggtgcggcagacggatgtgggttcaaccagacgcccgtaccgtccaatgctcaacctgccacaccgtcacgcagctctactcgctagtggacatagctcgcggtgcaaaccgcataattcatgggtttnnnnnnnnnnnnnnnnnnnnnnnnnnnnnnnnnnnnnnnnnnnnnnnnnnnnnnatgatggctcaaccgccaccacggctgcttgagcctcttccctcgctgtttgggaagaagagagcagttttatgcggcgtgaactataaggggaaaaagttatagcttgaaaaggttgcatcagttgatgctaagtccatgagatcttaatgggtcaacaaaatgggtttccctaatg

SEQ ID NO: 18174 - DNA, 384 bp, Arabidopsis thaliana
  Clone ID: LIB35-029-Q1-E1-A3
gacgaagaagcaaagatgttcagaaaccaatacgacacagatgttacgacatggagtccaacaggtcgtttattccaagtggaatacgccatggaagcagtgaagcaaggatctgcagcaattggactcagatctcgttctcatgtcgttctcgcttgtgttaacaaagctcaatcggagctttcttcgcatcagaggaagatctttaaagtcgatgaccatatcggtgttgcaatcgctggtctcacaagccgacggtcgtgtattgtctcggtatatgagatcggaatcgattaatcactcttttacttatgagtctcctcttcctgttggtcgtctcgttgttcaaccttgctgataaagctcaaaggtctgtacccaacg

SEQ ID NO: 18175 - DNA, 458 bp, Arabidopsis thaliana
  unsure at all n locations
  Clone ID: LIB35-028-Q1-E1-H12
gcgtccgtacggctgcgagaagacgacagaaggggacaggagtcgagagagaaattagccatggcgaccagagctttgctcgccgttatatatgcgtctccgaatcgctgctacatctctccgagcaggatcaaaatccaatctttaacttgttcttcttcaagtcattattaccaaagacagagtagaaaaaaccacagaatagctcgaagttactcgtctgactcggattcctccgttcttcagccgccggatgtggcccgtcttgctcagacagctcgaatctctctaactccggcggagatagaggaatgtgaaactaaaattcgtcgagtcatcgactggtttgggcaacttcaacaaagttgatgttaacagtgtggagccagctattagagcagaaatggatggtgggaaatttgcgagaggatgctccagaaacatttngacaacaagga

SEQ ID NO: 18176 - DNA, 396 bp, Arabidopsis thaliana
  Clone ID: LIB35-029-Q1-E1-A4
aagttttctactttgcaatttagataaatctttctatccacattgagaataaattaagggctctcaatttcgaattctgcttctccaacgaaaaaaacgaaatctttaatggcgaagaaaggaggagcgacgctagctgaggatgcaccatggcgagtttcgtcaggaagaccagtgcctaagatcagtcgctctccggttttatctatctctcaaaacccaagaaaccgattacgccatttccgtcatgaagcatccgaatcctgtgggaggtgggtttgcgatggaagctgtacttgaatccgcaggacctgaatgcgttgttcctggccaagtaacacctcttcggttacttgggtgttaaggtgtggcctgttgaagttgatcttaaaattc

SEQ ID NO: 18177 - DNA, 391 bp, Arabidopsis thaliana
  unsure at all n locations
  Clone ID: LIB35-029-Q1-E1-A8
gttggagaggaaatggcgtcgggatggggaataacgggaaacaaagggagatgctacgatttctggatggatttcagtgaatgtatgtctcactgcagagagcccaaagattgtacccttcttcgtgaagattacctcgagtgtctccaccattccaaagagtttcaaagaaggaacaggatatacaaggaggagcagcgtanactaagagcagcttcgangaaaggtgaanaanccggagatgggactcacanccatcactagtctcaacaatcctccttcaagcttcatccgattccaganaagaatnatanaaggttcatgngaacattttgtatcttggaatctctaanacgctttgattgtttttcagttttcaantttatccaat

SEQ ID NO: 18178 - DNA, 378 bp, Arabidopsis thaliana
  Clone ID: LIB35-029-Q1-E1-B11
tgagaggaaaatcaatccaaatgtagtcactttcagcgcattgattgatgcatttgtgaaggaggggaagcttgtagaggctgagaaattgtacgacgagatgatcaaaaggtctatagatcctgatattttcacttatagttcactgatcaatgggttttgtatgcacgatcgtttagacgaggccaagcacatgtttgagttgatgattagcaaggactgtttcccaaacgtagtgacttacaatactcttataaagggattttgtaaggctaagagagtagacgaaggtatggaactcttccgcgagatgtctcaaagaggattggttggcaacacagtcacttacaccactcttatccatggattttttcaagc

SEQ ID NO: 18179 - DNA, 373 bp, Arabidopsis thaliana
  unsure at all n locations
  Clone ID: LIB35-029-Q1-E1-B5
gtttaaaattaaaaaaaaagaangtaaaagagtcagagccgcctaagagaaatcgatnacaaattcaagaagaaaagaacaagagaaaacagaggaagangtgagatggaagaacttgtanggcttctgagaatccgagtgaagagagggatnaatcttgctcagcgagacactctaagcagcgaaccttttgttgtcataaccatgggatnacagaagctgaagactcgtgttgtggaaaataactgcaaccctgagttgaacgaggaattaacccttgcgtttaagacatcccgatgaacctgtgaaatcctgatagtgtatgataaagatacattcacatcgcacgacaagattggagatgcaagataga

SEQ ID NO: 18180 - DNA, 379 bp, Arabidopsis thaliana
  unsure at all n locations
  Clone ID: LIB35-029-Q1-E1-C5
gaaaacttaaaaaagttcccaatttcgaaaaatgtcactaaccgcacaattctcgccgccggtcaccggaataaccaggagtctccgggatacaaaaccgtcactgtctaatctccgtgtattttcggtttacactgagataagaactatgacgacgagtaatctgaggaaatcggcgtgttttgtggctaaggctatagaacagagacgaagatacagctggatctgaatcggaatcagaagcgactcccgtcaccggcggaagagagtggaagcggagaagataaggaattggagattaccgcgataggagcagagataaaagcagcgattgagcagaaggaaaacgggcggaggaagaagaaagggaaagaaccna

SEQ ID NO: 18181 - DNA, 389 bp, Arabidopsis thaliana
  unsure at all n locations
  Clone ID: LIB35-029-Q1-E1-D6
gaaaggaaaatatgagtgaggacaagaggaagcaacacttcgtgctatctacatggtgcgtgccacggcncatggtgctggtacaaggtnaagcctcttctcgaggctttgggccatcatgtanccgccttagacctanctgcttccggtataganacaaccaggtcaatcactgacatttctacatgtgaacantantctganccattgatgcagctaatgacntcattgccnaatgatgacaacgttgtactcnttggtcatagctttggangtttgagtttagccttaaccatgggataactttcccgataanatctctgtcnctgtcntcgtnactgcattcatgncccgacnncaaacantcancatcnctcggtctaggaaat

SEQ ID NO: 18182 - DNA, 382 bp, Arabidopsis thaliana
  Clone ID: LIB35-029-Q1-E1-D9
ccaaaaaaataaaagatttttacattcgacgagaccgtgatcgaaacggcgatggttgaccaagagtcctcgccgtgttgtcgtggcggcgctcctattgtttgtggttctgtgcgatctttcgaattctgcgggagctgcgaattctgtgtcagctttcgttcagaacgccatcttgtccaacaagattgtcatcttctccaaatcctactgcccgtattgtttgcggtcgaaacgtatattcaagccaacttaaggaaagagccatttgttgtggagcttgatcagagagaggacggagatcaaatccagtatgagcttttagaattcgttggtcgtcgtactgtcccgcaaagtttttgttaacggcaagcataattgg

SEQ ID NO: 18183 - DNA, 377 bp, Arabidopsis thaliana
  unsure at all n locations
  Clone ID: LIB35-029-Q1-E1-E1
aagagacaaggaggcatgtttgtgaagatcaacatgtatggtgttccaattggncgtaaagttgttctcattgctcataatagctatgngnagttacctttcanagttgacaancncttcaaaggcctncttgcanctcaaaganactttccancanccatagaagatgaaaanccaancacnggattattagatgggaatggggaatatacccttacatatgaagacaatgagggagacaagatgcttgtaggagatgttccatggtaaatgtttgtgtcntcggtgaagaggctgcgtgtgattaaaacttctgagatttcttcagcattaacatatggaaatggtangcaagagaatntgagaagatgaagaaa

SEQ ID NO: 18184 - DNA, 394 bp, Arabidopsis thaliana
  unsure at all n locations
  Clone ID: LIB35-029-Q1-E1-E4
tatcgtcgggattttttgaccggagaaatggggaggaggattttgaacgatgcgttgaggacgattgtgaatgctgagagacnaggaaaagcttcggtggagctcaaaccaatctccaccgttatgtcttcgttcttgagaatcatgaaggagaaaggttatatcaagaactttcaagtgtatgatccacatagagttgggagaataacagttgatctgcaagggagggttaatgactgcaaagctcttacctacaggcaanacgttagggcaaaagaggttgagaaatacactgaacgcacacttccaacacgtcagtggggttatgttgtaatcacaactccggatgggattttggaccaangannaagcantcangcggaatgtggggtgg

SEQ ID NO: 18185 - DNA, 377 bp, Arabidopsis thaliana
  unsure at all n locations
  Clone ID: LIB35-029-Q1-E1-E9
tggcagtgagacaaaaagcaatggcgacgttgccgaaactgattcaaagcatgagaaacgaagttacgaagcagcccagtcttgtcttaccatctctcagaagagctttctctctctacgatcagatcaatctcatcgataacgttcctgaggatcagctccgatttcaggagtattcatctctctcagtcatgttcctaatttgactatgtagcaagggaatttggattttcgggtatgaaatgaatcaattaatggtgctttttgcaggtttgatgagacgagtttcactgtgaatggggttaaatacgaaggaagcttgctctgtgttgggaatttgctaangtcatggaaccctcgttacttctccgacanca

SEQ ID NO: 18186 - DNA, 397 bp, Arabidopsis thaliana
  unsure at all n locations
  Clone ID: LIB35-029-Q1-E1-F2
gagggggcttttgaatttttttgctcaacttccaaatcgtcgccggcgatagaaaccctagatttgattctccgtcggttatatcnagcaatgtcgttttttcccccacagcaacaacagacgcctcagccgctgtttcaaactcagcaaacgtcgttgtttcagccgcagcaaaccaattccatcttctcgcaatcgcaaccacagcaaaccaattccatcttctcnnnnnnnnnnnnnnnnnnnnnnnnnnnnnnnnnnnnnnnnnnnnnnnnnnnnnnnnnnnnnnnnnnnnnnnnnnnnnnnnnnnnnnnnnnnnnnnnnnnnnnnnttgtatttgttcaccaacgataaagctccggcgaattacangtactaaagtgggccgatcttcatc

SEQ ID NO: 18187 - DNA, 374 bp, Arabidopsis thaliana
  Clone ID: LIB35-029-Q1-E1-F7
agaggaaagttgctacttccttgaaattaatcaatgacacacttgatgatttgattgcaacatgcaagagaatggtagaagaagaggagttgcagtttcacgaggagtatatgaacgaaagagatcctagcatccttcactttcttttagcttcaggagatgatgtctctagtaagcagcttcgtgatgacttgatgacaatgcttatagccggacatgaaacatcggcggcagtattaacatggaccttttaccttttaacaacggaaccaagtgtagttgccaaacttcaagaagaggttgattctgtaattggagatagattcccaaccatacaagatatgaaaaagctgaaatacactactccgagtcat

SEQ ID NO: 18188 - DNA, 422 bp, Arabidopsis thaliana
  Clone ID: LIB35-026-Q1-E1-G1
aacggaagatctgcaactgaatctggagaagactgcttttccgggctcacaaacaggtgtctaatagaagttgtagacaaagcctatagcggaaccatcatcacttgcaagattcatgacatggttcgtgatttggtgatcgatatagccaagaaggattcgttctctaacccggaaggcctcaactgtcgtcaccttgggattagtggaaactttgatgagaagcagatcaaagttaaccataagctgagaggcgtagtgtcaacaactaagacaggtgaagtgaacaagctcaactcagacttagctaagaaattcacagactgcaaatatcttcgggttctcgatatctcgaaatccatatttgatgctcctctgtctgagattttggatgagattgcaagccttcaacacttagcatg

SEQ ID NO: 18189 - DNA, 386 bp, Arabidopsis thaliana
  unsure at all n locations
  Clone ID: LIB35-026-Q1-E1-G11
atcaacgctcgtgcacgccaaagtcttgtcaacggaggtggaatcattgagacttgtttctggcccgggaagtatgcattagagctaagttcagccgtctatggtaaactatggaggtttgaccaggaaggcttacccgcggatctcatcaaaagggggttggctgaggaagataagaccacagaacatggagtacgtctgacgataccagactatccatttgcaaatgatggtctaatattgtgggatgcaattaaagaatgggtgacagactatgtgaagcattactatcctgatgaagaactgatcacatcggacgaggaactccaaggatggtggagtgaagtgcggaacataagccacggagacaagaaagacgaancttg

SEQ ID NO: 18190 - DNA, 427 bp, Arabidopsis thaliana
  Clone ID: LIB35-026-Q1-E1-G4
accacaaccctggaccaacaacactgtgtatgtcgccaagaaaaacggggcagtgcgcgtgtgcattgactgcacccctgccaaccaggtgactgaggatttcgattggccgctgccgcgcctgcaggacctgcgccaccgtctggccggggccagatggttctcacgtatggatctcagcgacgcgttcttccgcatcagcgtgcctcacgaaatgcggtaccccaccacctacacatgcgacaacgttgactactggttcacaaaaatgccgttcggactcaagacggcaccgagtgtgtttcagcggttcatggaccacgttcttgcgcgttgcaagaacgaagctttctggtacatggacgatgtactggtgactgccgacagtcgggaagagctcgtccgccggacgcgcaaggtacggcat

SEQ ID NO: 18191 - DNA, 425 bp, Arabidopsis thaliana
  unsure at all n locations
  Clone ID: LIB35-026-Q1-E1-H1
gagggggcttttgaatttttttgctcaacttccaaatcgtcgccggcgatagaaaccctagatttgattctccgtcggttatatccagcaatgtcgttttttcccccacagcaacaacagacgcctcagccgctgtttcaaactcagcaaacgtcgttgtttcagccgcagcaaaccaattccatcttctcgcaatcgcaaccacagcaaaccaattccatcttctcacaaccgcagcaacaacagcaaacgtcgttgtttnnnnnnnnnnnnnnnnnnnnnnnnnnnnnnnnnnnnnnnnnnnnnnnnnnnnnnnnnnnnnnnnnnnnnnnttgtatttgttcaccaacgataaagctccggcgaattacagtactaagtgggccgatcttcatcccgattctcagaaactcttgcttcagatt

SEQ ID NO: 18192 - DNA, 431 bp, Arabidopsis thaliana
  unsure at all n locations
  Clone ID: LIB35-026-Q1-E1-F4
gtcagctcaactacccaagtttctcggttttgtttgggggtaaaagagttgtgcggtacactcgggaagtaacaaatgttggtgcagcaagctcggtttacaaagtgacggttaatggagctcctagtgtcggaatctctgttaaaccatcgaaactttcgtttaaaagcgtgggagagaagaagaggtacacagtcacgtttgttagcaagaaaggagtgagtatgacgaacaaggctgagtttggttccatcacttggagcaatccgcagcacgaagtgagaagtcccgttgcattctcttggaaccggttttgataaaaaaactaacatccctagtgatgatgttttctatttaaagttatcttgattgggtttangctaaaccaaagcccatcatgagccataagtagtgggaaatgttcctgtgtn

SEQ ID NO: 18193 - DNA, 379 bp, Arabidopsis thaliana
  unsure at all n locations
  Clone ID: LIB35-026-Q1-E1-H12
ggactccgnnnnnnnnnnnnnnnnnnnnnnnnnnnnnnnnnnnnnnnnnnnnnnnnnnnnnnnnnnnnnnnnnnnnnnnnnntgaatcggaaagattactggttgttcgaagggatcattgtgaaggtgatgagtaaggctttggcagagaaagggtattataagcaaaaangtgttgtgaagaaagtgattgataattatgttggggagatcaanatgcttgattctaaacatgtgttgagagttgatcaaaangagctagagactgtgcttccacaaattgganggatggtgaagatagtgaatggggcatatcgtggttcnaatgcaangttgttgggtgtggatacagagaagttctgtgccaaagtgcanatcg

SEQ ID NO: 18194 - DNA, 417 bp, Arabidopsis thaliana
  Clone ID: LIB35-026-Q1-E1-H5
gatacgatgttgctgagataatagaccggagaaagacgacgaagagatcagcgattttgtttactcctccaatggattcagctcgagaggtcagcgatggtagacttaccgtcgaaggtttctctgtagcttctcgagcttttgccgataagtggaagatacataaccaatcgttccctccatggtcttgggttcctctgatcaatcgaactctacttgtttcaaagaagcaggaggaaggttacttgtcgctggagaagatcataattctcagttcacttgaggaggaaattccagaggatgaatctctaaatgtagctactgattgcttggaaaaagaagaaacagttgatcacgcgattttggtcccaaccatggaaaatgaagcacactactatgatttccatatagtttaca

SEQ ID NO: 18195 - DNA, 383 bp, Arabidopsis thaliana
  unsure at all n locations
  Clone ID: LIB35-026-Q1-E1-H7
tggtttttggaaatggggagctttgattatcgcatttctagcttatttcaccaactttgttagtaaactcaacagtctagttgttaggttaagaaaaatagatgtctctgtttcctctccaactctttttgatgattacgatagcgattccgatgtttcttgttcctctaccgtctcctctgacgatgaaaaagacgaagaagatgaggctgatgatgaagatgaggatgttgactcgatctttaatcgaagacgagtcaacggaggtttccgcgttannnnnnnnnnnnnnnnnnnnnnnnnnnnnnnnnnnnnnnnnnnnnnnnnnnnnnnnnnnnnnnnnnnnnnnnatagtggtagttttggagatttgtctcatgggc

SEQ ID NO: 18196 - DNA, 428 bp, Arabidopsis thaliana
  unsure at all n locations
  Clone ID: LIB35-026-Q1-E1-H8
gaaagaggtgatgatttgataagggtattgagagagttatctgttgttcaaaggaaaattgcagacttacaggtcgagcttcaagggaggaaggatgataaaaatgtggcgcatttgactcatgttggtgaaatgcaaaagaaaatcgagactttgtcaaggattactcaaatattgaaagatgttatacaaaacaaggatcgcattattgctcgtctccaacaacaccaggaggtaacgaaatgacacatagagactcagattgtgtgactccacctcaagggangatagagtcaagcttcgacgatttaactgttcataaaacaaaggagacaaaacaatgatcaaaatgaagaagaaagaagaaagaanaagaaagaangaagatggtaataacaaatgggaacccgaggactatccttggctcc

SEQ ID NO: 18197 - DNA, 445 bp, Arabidopsis thaliana
  unsure at all n locations
  Clone ID: LIB35-027-Q1-E1-A10
aacgacagaagggggagacaaaccaaaaaaaagcctaaaaagccgaccttttttctttctttctctcctctacctctcagcttctgctggatctctccagcagacacgatcttgttcggagagattcgtaggggaccgatctatcaaggcttcaagggcaaacagaaatggaccacgacaagacaggatgccaaagcccacctgaaggtcccaagctatgtactaacaactgcggtttctttggaagcgctgccacaaatgaacatgtgttctaagtgtcacaaagggatatgttgttccaacaggagcagggcgctaagtttgcatccgcaantgttctggaacaatccgtcatccaagcaacatcataaaaggaaacctttaccgctgccgttgggccgatattgaaaaccaaaatcccgttgaacccgatgaacggtttctg

SEQ ID NO: 18198 - DNA, 396 bp, Arabidopsis thaliana
  unsure at all n locations
  Clone ID: LIB35-027-Q1-E1-A12
caaaccaactccatcaggcacagcctcaaacccacttcccccaccagccccggcatcagtcccttctctgtctgcaatggacctcttagcctacgagaggcaactggctctanccaagatgcatcctcaggctcaacattctctgaggcaagcaggtcttggagtcaatgttgctggaggaactgcagctatgtatgatggtggctatcagaatgtagctgcggcccatcagcagctcatgtactatcagtaataaaccctcttcactggctctgagatacctttttccgtntcttccttttcctcctcttaattttatnactttccttgctttttctagacttccntgttcangagtccttatgtaaggtgtcnccttcattttnaagccgtttg

SEQ ID NO: 18199 - DNA, 470 bp, Arabidopsis thaliana
  unsure at all n locations
  Clone ID: LIB35-027-Q1-E1-A4
gcgtccgtacggctgcgagaagacgacagaaggggattgctacaggaagactaggatcttcatggagaattttcttcccaagttggggatcactgtcactgtgattgatcctgctgatatcgcagggcttgaagctgcagtgaatgagttcaaggtatctctgttcttcactgagtccccgacaaacccattccttagatgtgtcgacattgagctagtttcaaaaatatgccacaagaggggaactctggtttgcattgatggcacctttgcaacacctctgaatcagaaagcccttgctcttggtgctgatcttgtcgtgcactctgctacaaagtacattggaggacacaatgatgttccttgccggatgcatctgtgggtcactgaaattgggttcaaaaattcgcaatcctgcatcaagtgtttgggaaggaacaacttancccaaaacaatccttccttgagnc

SEQ ID NO: 18200 - DNA, 320 bp, Arabidopsis thaliana
  unsure at all n locations
  Clone ID: LIB35-027-Q1-E1-A7
gctgcgagaagacgacagaagggtacggctgcgagaagacgacagaaggggaaaaaaaaanaaaaanaaaannnagtaaaaagcggccgctctagaggatccaagcttacgtacncgtncatgcgangtcatanctcttctatantgtcacctaanttcaattcactggccgtcgttttacaacntcgtnactgggaaaaccctgncgttacccaacttantcgccttgcagcacatccccctttcgccagctggcgtaatagcgaanaggcccgcaccgatcgcccttcccaacagttgcgcaacctnaatggcnaatg

SEQ ID NO: 18201 - DNA, 443 bp, Arabidopsis thaliana
  unsure at all n locations
  Clone ID: LIB35-027-Q1-E1-B12
gcgtccgtacggctgcgagannnnnnnnnnnnnnnnnnnnnnnnnnnnnnnnnnnnnnnnnnnnnnnnnnnnnnnnnnnnnnnnnnnnnnnnnnnnnnnnnnnnnnnnnnnnnnnnnnnnnnncttcttcttcgtagggtgttcatcgttattaacgttatcgcccctacgtcagctccatctccaagaaacatgggtgcangtggaagaatgccggttcctacttcttccaagaaatcgggaaccgacaccacaaagtgtgtgccgtncnaaaaaccgnctttctcngtgggggatntgaagaaagcaatccccgccgcaatgtttcnaacgctcaatccctcgctccttctcccaacttancantgacatcnntatagnctcangcctttaantaangttgccaccaattnaatttctctcctcccctaaactctcnccta

SEQ ID NO: 18202 - DNA, 429 bp, Arabidopsis thaliana
  Clone ID: LIB35-027-Q1-E1-B3
agaagggggaagaagcagtaacaaatttggtgaagtcacgagaatcaacgatgacggcgacgaacaagcaagtcatattgaaagactacgtgagtggtttccctacggaatccgatttcgatttcactaccaccaccgtcgaacttagggttccggaaggtactaactctgttctagtgaagaatctctacttgtcatgcgatccttacatgagaattcgcatggggaaacctgatccttccactgctgctcttgctcaagcttacactcccggccagccaatccaagggtatggagtgtctagaataatagaatctggacatccagattacaagaaaggagatttactctgggggtatagttcatgggaaggatacagtgctatcactccaatgactcacgcgcatttcaaagattcaacatactgat

SEQ ID NO: 18203 - DNA, 466 bp, Arabidopsis thaliana
  unsure at all n locations
  Clone ID: LIB35-027-Q1-E1-B6
gcgtccgtacggctgcgagaagacgacagaaggggatctccttgaaggtcttgcagattttgaaaagcaattaaatgttcccggaggaactgttgatgcacaagatgtgaaaagtggtggaactgataaagctgatgaatcgaagggtccaaaaggtacaaaaacaggttcgagcaatggatccaagtggaagtctatgctgaagaacatcgttgaacaagtttcccaggtcccaattactttgtctataggggtgtcttcgcttcgagggacactgtgtgtacacatgaagccgcctccatctgatcaactgtggtttggcttcataagcatgcctgatattgaattcaaccttgtcccctccngttgggtgaacacaanatcacaaaacaagcatgttgctaagttccttgggtcaaccggttcaaagacggcgatacgagactcatggtgctccccaanttgt

SEQ ID NO: 18204 - DNA, 505 bp, Arabidopsis thaliana
  unsure at all n locations
  Clone ID: LIB35-025-Q1-E1-H4
ccggnccggaaatcccggggacttcccangcntccgttcggctgcgaagacgacagaagggcataaaaaaaaaaaaacacaaaaaagtttcaatggccgcctcaacaatggntctctcctccctgctttcgccggaaangntgtgaacctttcccctgcggnatcaaaantccttggaaacggccgtgtnacaatgaggaaaactgttgccaaaccaaanggtccatcangcaacccatggtacggatncgaccgagtcaaatacttgggtccantctccggcgagtcacccanctaccttaccggagaattccctggagaatacggacgggacacaactggtctatccgctgaaccccgagacantcccaaggaaccttgagnctanaaatttatncacaacaaggtgggccaagccccgganccctaaggtgcgtcttccccgaaaccttttggcaagaaccggngtcaanttttgngaagcaattttggtcaaaggctgggt

SEQ ID NO: 18205 - DNA, 359 bp, Arabidopsis thaliana
  unsure at all n locations
  Clone ID: LIB35-025-Q1-E1-H5
ggctgcgagaagacgacagaagggtacggctgcgagaagacgacanaagggtacggctgcganaagacgacacgaangggttgattgtaanncaaaaaaananantancaaaatnaaaancggccgctctataggatccaagcttacgtncgcgtgcatgccacntcatagctcttctatagtgtcaccnaaattcaattcactggccgtcgttttacaacgtcgtgactgggaaaaccctggcgttacccaacttaatcgccttgcatgcacatccccctttcnccagctggcgtaatagcnaacaaggccgcaccgattgcccttcccaacagttgcgcaacctgaatggccaatgg

SEQ ID NO: 18206 - DNA, 414 bp, Arabidopsis thaliana
  unsure at all n locations
  Clone ID: LIB35-025-Q1-E1-H6
cggagcttatccgttacgactgcgtcattgcacggaaagaagaaatccatggatatggccgaacgangtctcgatactggccggagatctcttactgtttctcgttctcctttgggtttaacangangcgancggactgtgaaacggttaangctatcnaaagcacttacagtaccagcaacaacaactatatatgaagcttgtaaaangatggcttcacgacgagttgatgccttgttgttgactgactctaatgaaatgctttgtggtattcttactgataaggacatagctacaagagtgatttcacaggaacttaatgtcnaggaaacacctgtatctaaggttatgacnaagaanccaatgtttgttctccaanaaacacttgctgttgaaactctccaaaagatggtc

SEQ ID NO: 18207 - DNA, 470 bp, Arabidopsis thaliana
  unsure at all n locations
  Clone ID: LIB35-025-Q1-E1-H7
gcgtccgtacgaagaagacgacagaaggatacggctgcgagaagacgacagaagggggtcgaccttttttctctcacttacccaataagagcttttttcgcgttttccaccgcaaccaccgtcaccttcaaccgccggagccgccgcaaggaaggctcatcatccgccgtggcaattttttgaggtgtacaaagcattgcctatttgacgaaccaggaaatggttaaaaggcatggagagttttgatttacaagatatatcatgtcgcagtgcatagacggtttcaagcatgtatgctcctctttttccggtgttttgatatcgatatttacaaacaatctgggaggccttggtgaccctgaacttcttgcgaaagagacagtttttaaccgtgagtgaaatagaagctctctaagaanctgtttaaagaaaatcagcaattgctgttaattgatgaanggctaataaac

SEQ ID NO: 18208 - DNA, 432 bp, Arabidopsis thaliana
  unsure at all n locations
  Clone ID: LIB35-025-Q1-E1-H2
aggggactcggcgaagaagaaatcagaaaagagtcagagaaaaaaaaaatcaaggaagatgagtagcattggnactgggtacgatctctccgtcaccactttccctcccgatggccgtgttttccagatcgagtatgccgctaaagctgtcgacaacantgggactgttgttggaatcaagtgcaaagatgggattgttatgggagttgagaaacttattgcatcaaagatgatgctaccaagttccaacaaggagaatccaatctgttcatcngtcaagctggcaatggctgttgctgggccttgcaacctgatgggaaggcaaaanttgttgccccnttgctaaagttctgaaagcaccaaaancctaatgaagaaatggttttaaaggggcgaatgccggtnacctgtttaaagggaacntttctgaaa

SEQ ID NO: 18209 - DNA, 418 bp, Arabidopsis thaliana
  unsure at all n locations
  Clone ID: LIB35-026-Q1-E1-A8
ctctcagtctactttatccgatcggcgccggcgagattcaagggtaaagaagaagatgagtggtgaagttgttttagctgctagagtttatcgtgaccttctcaaagcagtggtgaaacatgttggtaaagaagatcacaagtctcatttcttagactttgttaagcaagaatttcgaaagaatgcaaactcagagaaaataaaccttgctcgaaattatacatatcttctcaatagcattcactctcacaaggatctgctgttctcatacaacattgcggttgataagaactgaagaaatgaaacgagtgcttaataaatctgcagccagtgtanggcttcgtcttcctgaagtttacgagccttgatcatgcattcattcctctttgtctttccgggggatgagtcgttatgattt

SEQ ID NO: 18210 - DNA, 448 bp, Arabidopsis thaliana
  Clone ID: LIB35-026-Q1-E1-B11
acgcgtccgcgacagaaggggggggaagacaattccgagaaaatagagagtagagagatcctaaagagtcaaaagaggtcaggtgattgattaacccgttgaataatctccttctcccgttgaatcgggtcgaaatagttgaactttaagccaaaccctagcttgaggaggaagaggaatggtcggcgtgatgaacagattgaggaatctggacgcttaccctaaaatcaatgaagatttctacaggcgtactctttctggtggtgttatcaccctcgcctcttctattgtcatgctaattctcttcttctccgagcttcagctgtacattcacccggttactgagactcagcttcgtgttgatacatcaagaggagagaagctacggattaattttgatgttacattccctgcgcttcaatgttcgattatagtcctgattccatgg

SEQ ID NO: 18211 - DNA, 361 bp, Arabidopsis thaliana
  unsure at all n locations
  Clone ID: LIB35-026-Q1-E1-B7
tatgggatctttcgtgaaagaagaaacgtcgtcgttgatgacagattttttggagaagtgcggtggttatgcggtggtggatggagggtttgcgacggagctacagcgccacggagctgatatcaatgatccactttggagtgctaagtgccttattacttctcctcaccttgttacaaaggtgcacttggattaccttgaatctggagcaaatatcatcataacagcatcttaccaggcgacgatacanggttttgtggcaaaaggtctatcggtgggagaagcananaatttacttagaaggagcgttgaaatcacgtacgaggcacnttagattttctacaacagatgcaccaagggt

SEQ ID NO: 18212 - DNA, 377 bp, Arabidopsis thaliana
  unsure at all n locations
  Clone ID: LIB35-026-Q1-E1-C12
gatgaatcccttcagagcgatgcagccgcgagattgccagtcacacttgctctcgctagcttatggctccgtagaaactatgctgataccgtcctggtgagagttgtggattcattaccagaagtgtatccgaaggtagagacttggatagagaatgtggtgtttgaagaaggtaatgcaacaatacttacactctttgtctgtctcatcacaattctctatctccgggaaagacaacgtagacaagtcgtcgttgttgccgatccagtggctgctgacgtggcacagccgctcgacgctgatgtggcgcaacacctcgctgcgttcccacggtaatcaantngtaatcgtttttcgtcaattgtaataacngaaaa

SEQ ID NO: 18213 - DNA, 418 bp, Arabidopsis thaliana
  unsure at all n locations
  Clone ID: LIB35-026-Q1-E1-C7
aaaaaaaaagtgagcgtgttgatgcataacgaacgatgccattttccgcatcaatctcatcgccttcttcttctgtcgcgcttcttcgatcgcctctctctttcttcatcttcactcccaaaaccctaatcttcaccagaaccaggatctctggtttcccttatcttgcttcccggcgatcccgcgatttcatcaacgggagggatgatttcgctgacgatacgaggagctggaaccggaagatcaaaccggagtatgggttcnnnnnnnnnnnnnnnnnnnnnnnnnnnnnnnnnnnnnnnnnnnnnnnnnnnnnnnnnntggatctgttacttagatttgtagaaaatgttttcagaaagatttctaagagagcaaggaaagctgtccgatcaattttgcctgtttcgatctctac

SEQ ID NO: 18214 - DNA, 398 bp, Arabidopsis thaliana
  unsure at all n locations
  Clone ID: LIB35-026-Q1-E1-D10
atgagacttctcctctgaaagcaattgattttggtctttctgactatgtcaagccagacgagaggttgaatgatattgtagggagtgcttactatgtggccccggaagttttacaccgtacatatggaacagaagctgacatgtggagtataggagtgattgcttatattcttctctgtggcagtcgacccttttgggcccgtactgaatccggaatctttcgagctgtactaaaggcagaaccaaattttgaagaagctccttggccttctctatcacccgaagctgtagattttgtgaagagattgctaaacaaagattaccgtaaaagactaactgcggcccaagcttcgtgtcatccctggctggttggctcncatgaactaaagattccatct

SEQ ID NO: 18215 - DNA, 422 bp, Arabidopsis thaliana
  Clone ID: LIB35-026-Q1-E1-D2
gaagtgaaaccttcttcctctttcttgaatccatcaaagaatgctacgaagctcttgtcattgccaaattcttggcattgatgtatagttatctaaacatatctatgagcaaaaacattttgcctgatggaatcaaaggaagagagattcaccattctttcccaatgactctttttcagcctcatgtagtccgtttggatcgtcacactcttaaacttttgaaatactggacatggcaatttgtggtcattcgacccgtgtgctccactttgatgatagctttacagctcatcgggttttatccttcatggttgagctggacattcactatcattgtcaatttctcggtttctctggccttgtattctcttgtgatattctaccatgtgtttgctaaggagcttgctcctcataatccactc

SEQ ID NO: 18216 - DNA, 401 bp, Arabidopsis thaliana
  unsure at all n locations
  Clone ID: LIB35-026-Q1-E1-E9
aagagaccggtggggctcagattcagactcagatgtggaaannnnnnnnnnnnnnnnnnnnnnnnnnnnnnnnnnnnnnnnnnnnnnnnnnnnnnnnnnnnnnnnnnnnnnnnnnnnnnnnnnnnnnnnnnnnnnnnnnnnnnnnnnnnnnnnnnntcatgccagtagcaacaagaggaaacatgaagaactcggttccagtgaccttccttcnnnnnnnnnnnnnnnnnnnnnnnnnnnnnnnnnnnnnnnnnnnnnnacatcgtcgtcatattaagtctgatatgttttgtatttcactttgtacctgctctatttcagcttgtgtgctcagttttgttataattggtgatggaaaatggtgatttacatattaatgaagcaatttatttttctcacaa

SEQ ID NO: 18217 - DNA, 295 bp, Arabidopsis thaliana
  unsure at all n locations
  Clone ID: LIB35-026-Q1-E1-F12
acaatggctcgagctggtcccagcttttggagacccttccccttccaaatatcaaatggatttgcccgactgctccttctcaaccaataagtttatttggtggttttccctccacagcttggtttgatgttgtggacatcaatgaagatggacctgatgatatggaaggattggatgtggctgctgcacatgttgcaaatctgttgtcgaatgagcctgctgacattaaattangtgttggaggattcaacatgggtgtggcgacatctcnataatctgcaactgttttgccccc

SEQ ID NO: 18218 - DNA, 424 bp, Arabidopsis thaliana
  unsure at all n locations
  Clone ID: LIB35-026-Q1-E1-F2
aaaagaaaagtttgcgactttgattggtttcgatgaagcttcgacaaacacagggttttgtctgaatccttttggtttatttccgagagaatttgtgttttttactttaagggtttgaaagaagaagcaagaacataaatgggttgtgcgggatcgacacagtctcaagcagatgggtcagtgaagaaaattaggaagccgaaaccgtggaagcatacccaaccgatcacgaaagctgagcttatgaaacttagagaagagttttgggacactgctcctcattatggtggtagaaaagagatatgggacgcacttcgcgctgctgcagaagctgacatatctcttgcacaagcaattgtggacagtgcaagagtcattgttcagaacacangatccacagtctgctatgacgagagaagtgcta

SEQ ID NO: 18219 - DNA, 398 bp, Arabidopsis thaliana
  unsure at all n locations
  Clone ID: LIB35-026-Q1-E1-F3
gttgcagagaatctagcgagaccaatggctactctggtctcgtctcaaacttacatctaccattgtcatattagtaaacaagctctttatcaggcaaaagaatcatactctcatcgtagaatttcccgtcataatcacagagaaagactcgatttttctcatagaaaccatagattgacaataactagaaagcagcaacctttgtctttcaacaccgtgtgttttgccgcagacgagccctccgaaatcagtgctgatgctagaatccgtagtgaggttctgtctccgttcagatcagtccgtatgttcttctacctcgcctttatagcaagcggttcattaggaggactaatagccacttctaggctcatangtgccctggcgaatccggctagatc

SEQ ID NO: 18220 - DNA, 445 bp, Arabidopsis thaliana
  unsure at all n locations
  Clone ID: LIB35-025-Q1-E1-E9
taaggtaatagaagctgctgagaagcctgaggagacgatagtaccaaggcaatttattgatttaggccctacgagagcagtaggtgaggccgaggatgtgtcaaattcttcatccgaagatagaactcgttcggggggttcttctgcagccgagaggcgtagtaacgggaagagacttgggcgtgaagaaagccccgaaactgagtccaacaaaattcagaagacgagaatatcaaccaacggtagtgaatttaggtttccggtgagtctctcaggtattcgtgatcgtgaagatgaagatttttcatctggcgttgctgggagataatgaccgtgaagttcccggcgaaattgggatttcttctcccgacaaagaaatccaangggttgnncttgaagacnacnaagggatttcctgtgaaanaaaggaagaacaaggatgttc

SEQ ID NO: 18221 - DNA, 437 bp, Arabidopsis thaliana
  unsure at all n locations
  Clone ID: LIB35-025-Q1-E1-F1
agatcgaagagaagaatagtttgatcatcctgtgaagaaaaataatggctgcntnnattatnccaacctccggggnaatnnaancaacngggttncacggtgggaaaaacggcggntaaaggattaccntcgntcacaaaagctcntccctccttcaaaattgtcnccagcggcgtcaanaagatcaagaccgacaancccttcggaattaacggcagcatggacttgagggacggcgtcaacgcctccggcaaaaaagggcaagggatacggtgtttactaatacgtcgacaagtatggagctaactcnatggatacagtcctaatttacaacgagaacgaatggtcaaccaantggtgaccttgtacaaaggaangatcaccggattggcaantttggccgtaactcctcgccggaattcttgccngaggtgctc

SEQ ID NO: 18222 - DNA, 435 bp, Arabidopsis thaliana
  unsure at all n locations
  Clone ID: LIB35-025-Q1-E1-F10
tccnnnnnnnnnnnnnnnnnnnnnnnnnnnnnnnnnnnnnnnnnnnnnnnnnnnnnnnnnnnnnnnnnnnnnnnnnnnnnnnnnnnnnnnnnnnnnnnnnngctagtgagagctgcgtcggtgaggagtttagggcacaagaatgagatagacatgttgatacaagagaagctgcaacagcagaagcaacagaagcaaggagggttgcctaagagctcgagtactgggatggcgaggatagaggaagaggaagaaacagaggaaggatctgtgaatccgaaggtgaagaagactaagaaagtctctgatcttttgtatcctcgtagcaaatcttacgccgttactactagtacccctatcttgtaacttctcttcntcctttttcctcntcttaattttagtantttgtggattgattaacaattttccanccca

SEQ ID NO: 18223 - DNA, 417 bp, Arabidopsis thaliana
  unsure at all n locations
  Clone ID: LIB35-025-Q1-E1-E8
ccacgagaaaacctaaattttattgaggtagcttattgcacggcggcgattagttgttttacttgttacaagaaaatcattccacggcggtggagaaaaaacaaaagagagcgagacaaagagagactacaatggctgttccaagaggaggaaatggtttgaatgaagaagaagatgttgacggagaaaacgctatctttgaggaaaacggtgttgactacgacaccgattccgagcttccctctcacctccgtgacttggccgccgctgctcaagccggagatgtcgccgccttgcgcaccgccatcgacaatttgaatgggagagtcgatgagccactccaaggataatgactccgcacttcacttggcatgtctatatggtcacctaccttgtgttcaactgctccttanaaag

SEQ ID NO: 18224 - DNA, 285 bp, Arabidopsis thaliana
  unsure at all n locations
  Clone ID: LIB35-025-Q1-E1-F12
gaagacgaagcacactgagaattcaccggccagagatcaccaataagtgttgtagtttccggttacttcgaataaccttcaatggagcttccgttactctcgtatgctaactccgcgtcgttttcacggacaggcttatgctcttcttcttcttcctcctcaactagtatctatgagtttccggagagaagacngagtttaaaattgagattcaatggtggaaaaangtcacgaaacnttataaccttccgctgaacggaacatttaaaggattgagaaaacacc

SEQ ID NO: 18225 - DNA, 432 bp, Arabidopsis thaliana
  unsure at all n locations
  Clone ID: LIB35-025-Q1-E1-F2
acgacagaagggtacggctgcgagaagacgacagaanggtacggctgcgagaagacgacagaagggtacggctgcnagaagacgacagaagggtacggctgcgagaagacgacagaagggtacggctgcnanaagacgacagaanggtacngctgcnaanaagacgacagaagggtacggctgcgagaagacgacagaagggtacggctgcgagaagacnacagaanggtacggctgcnagaagaccacagaagggtacggctgcgagaagacgacagaaaggtacggctgcgagaagacgacagaanggtacngctgcgagaagacgacagaaaggtaccgctgccaaaagacnacanaaaggtaccgctgccnnnnnnnnnnnnnnnnnnnnnnnnnnnnnnnnnnnnnnnnnnnnnnnngcggcnctct

SEQ ID NO: 18226 - DNA, 428 bp, Arabidopsis thaliana
  unsure at all n locations
  Clone ID: LIB35-025-Q1-E1-F4
aaggactaagacatcacgaggaacacgatgggtgaagcggtcaaggatggagttatccttgctcgttgtctangtgaagcgataaaggcaaagagtctgaaaggtgaaacagaagaaaatgaagaagagggttataagaggattgaagaaggtttgaagaagtatgcaggagaaaggaaatggagaagcattgatcttataacaacggcatatacagtaggattcatacancanagcaanagggaagtggatgaacatgttcagagacangttcctgtcgtcntacctttctaggatgctgctgaaaaaagtcccatttcaattgccggaagccttgtccatgatgatcctcaaccataaatccaaaaccttgtaatcctccttgtcatcacaactggannacaattttcacctttgggtttgctcaa

SEQ ID NO: 18227 - DNA, 453 bp, Arabidopsis thaliana
  unsure at all n locations
  Clone ID: LIB35-025-Q1-E1-F5
gcgtccgtacggctgcgagnnnnnnnnnnnnnnnnnnnnnnnnnnnnnnnnnnnnnnnnnnnnnnnnnnnnnnnnnnnnnnnnnnnnnntttcatctccgatcaggtaaagaaactctcaagctcaacaccagaggagccagaccacaacaagccagtcgaaggaaccgaaacagctacaagaccagctaccaacgccgagctcatggcaagtgccaaggttgtanctgaagctgctcaagccgcagctcgtaacgaatcaggcaaantcgacaanggtaaagtcgccggagccctctgcttgatatcttaaacgctgccgagaaatacggtagtttcnatgaaaatagnccactgggcagttactccgacaaggctganaagtatctcatcaattannaatcgttaaaatcaacggtngctggtggtccncctcctccgganaatcaagggt

SEQ ID NO: 18228 - DNA, 419 bp, Arabidopsis thaliana
  unsure at all n locations
  Clone ID: LIB35-025-Q1-E1-F6
ggctgcgtcagtaaaacgtattcttaaaagcaaccattggtgtgattgactctataagagaattcgtcagcgtgaagcaatctccaatctaatcgcagcatatcttctccgattcctattcgtctctgcaattgaatcttccggtaggcgaagatggcgacgtctgcgaaggatttgttgcggaggaggaagtgcatgcgccgttcgttgtgatcgtcgcacgttaaatttgaattctcgatcgtcatgtgttgttccagtgacgaatcgacggaatatgtgtgcgatcgggaagatttcgatgtcnatggaggatttgtcaccaccgtctgcggcggtgaagattgaaaggatcggtggaaggaaacccgtgggatcgttgtgtcnaggganaanctaaatgtgtggttgaganattc

SEQ ID NO: 18229 - DNA, 365 bp, Arabidopsis thaliana
  unsure at all n locations
  Clone ID: LIB35-025-Q1-E1-F8
gaagggggagaagaaaaagttgaaaaaattgtaaagtcagtctctccgactcttccttccttccgtgttcaccattgctacacgttctccacgaactttccgatgcccagtcgtcggagacatagctacaccgtcggatctcctgcaaccacatcttccaattacagtaacactactttcaccgatcgttccttcccgacaacccctgcccgtacatccaccgacacaaccacctccatcgctcgtcgcatctccggtatcttcatcaactgcttcactcctcccgattccgtttcctccaactacatcgacaattcaaagtctcttccgacaataatatccgtagtanacgtagctcaacagga

SEQ ID NO: 18230 - DNA, 419 bp, Arabidopsis thaliana
  Clone ID: LIB35-025-Q1-E1-G10
cactttgttcatctaaaaactcctcctttcatttccaaacaaaaacttctttttattctcacatcttaaagatctctctcatggcgatgtctttctcaggagctgttctcactggtatggcttcttctttccacagcggagccaagcagagcagcttcggcgctgtcagagtcggccagaaaactcagttcgtcgtcgtttctcaacgcaagaagtcgttgatctacgccgctaaaggtgacggcaacatcctcgatgacctcaacgaggccacaaagaaagcttcagatttcgtgacggataaaacaaaagaggcattagcagatggtgagaaagcgaaagactacgttgttgaaaaaaacagtgaaaccgcagatacattgggtaaagaagctgagaaagctgcgggtatgttggag

SEQ ID NO: 18231 - DNA, 427 bp, Arabidopsis thaliana
  Clone ID: LIB35-025-Q1-E1-G11
gccgaagtgttgttttcttatagaaggattttgatttcttctgcaaaattcgatcgatagtgacgagaaagatcctaagatggcgaccgcaagcgagagttcttcatttaagagatggcttccacttgaatctaacccagatgttatgaatcagtatctctggggacttggtcttgcccctgatgaagcagagtgcaatgatgtgtatgggttagacgatgaacttctagaggtggttccaaagcctgttcttgctgttctcttcctttacccaatcaccaaaaagagtgaagaagagagaatcgagcaagacaaggaaattaaggaaaaggtgcatagcgataaagtttactttatgaaacaaactgttggtaatgcttgtggaaccattggtcttctcatgctattgggaatattacctctgaaa

SEQ ID NO: 18232 - DNA, 466 bp, Arabidopsis thaliana
  unsure at all n locations
  Clone ID: LIB35-025-Q1-E1-G2
gcgtccgtacggctgcgagaagacgacagaagggaacttaagaaaaaaaaccaaaaaaaaagagagaggtgaaattgattttctgctcgcgatcgtcatttcaatttctaattagctttcctggtgtttcttctccggcgtaatcatgacaacctcaaaaagactagcagacaggaagattgagaaattcgacaaaaacattttaaagagaggatttgttcctgagaccaccaccaagaagggcaaggattatcccgttggtcccatccttcttggcttctttgtctttgttgtcattggatcatctctctttcagatcattangactgcaactagcggaggcatggcataaaccaaaatacagtcaagctagaagaagcagttttcaaaatgtagaatcatcctccgtcccccttccttttcnccccctaaactgtanaatgtgtcaactttccgtttacaaaac

SEQ ID NO: 18233 - DNA, 489 bp, Arabidopsis thaliana
  unsure at all n locations
  Clone ID: LIB35-025-Q1-E1-G4
gcgtccgtacgggcgaagaagacgacagaagggggagtccaagagtagtggtgaaggtggatttgaagaagaagccatggcagcaggaccaaccattgcacaatagatggcatccggagataccaccagtagcagaggtcaaggctggtgagtttttccgggtagaaatgattgatgcaatgggaggtgttatcaaagacaatgactctgcaagcgatatcaagaacctagtcctaactactggttgtagatgaggaangtgttgcagctaaagcangtgatcttcntgctgttgagatgtgcaacttgggtcctcttccanganatgaatgggggattcactgggttcgttttgatagaaaaaatggtgggcgggtttcntgactgaacaatttcccttgtnccnancaaaagctaantttggaacnttnnaagggattntaatgncctantcctcctcaanantnctgggaagttacnaatttcccg

SEQ ID NO: 18234 - DNA, 471 bp, Arabidopsis thaliana
  unsure at all n locations
  Clone ID: LIB35-025-Q1-E1-G7
gcgtccgtacggctgcgagaagacgacagaagggggctctaagacccagtttgactcgttgatcaacgaaagtgtgagtttgaggtgaaagatgacggcgacgatagatcggaggttatcaacgctgaatccaaacgcgccggtgtttgatccggtggaatttcgtgaggtggaggatttttcaccgaaatggtgggatctagtaacgacttcgaaatggttccgtgacttttggctcagtgctaactctgagaatgagttcctcggcggcgacgatttctcagttatggaagaagagttcgaggagatgatcgcatcgtctgatggtgggatccatggctgatacagttacagaagcaagatgttggctaattanttgaaaaatgcttttgaacaatagcggagtcctacnaaagagaagatttatagattcnaanggtttcgccntgttcaccaaaagtataacagaag

SEQ ID NO: 18235 - DNA, 373 bp, Arabidopsis thaliana
  unsure at all n locations
  Clone ID: LIB35-025-Q1-E1-G9
cttccaagaagaacaagatagccagtgagagtgatcctttagtaagagccgaacttcacaaactaaacggaaatggtcaagaacatgatcattcatccacatcaccaaaatctgatgaagcatctcgctctaccgttggacctcaggaaccgcaaagcccttatgtggaagcaccgaaacttggagaagagcaaatcaactatcacttcccaaggcctgcgccgcctccaggagcacagagacactcttaaactggcaatggattgattcacagatgaacgaaaaggttattttttcctttttttgctatataatataagtctttatgcatatttgatatatttgcangtgttggtattaccattatgtaatt

SEQ ID NO: 18236 - DNA, 373 bp, Arabidopsis thaliana
  unsure at all n locations
  Clone ID: LIB35-023-Q1-E1-E7
aaggcgctattatcagccatgagtaatctcatcagtttgcctgttcccgagaatcgtcaaagcgattccgttgttgagaatgatacttctgagacaaaacctattctactctggagagcactgtacgtgcaagagctagtcaagggtgaatttggaggtacgatcagttccatgcctagtccaagatggaaacttgaactacaatgagatagtggaatcagccgtgaagctatatgaaaagctcatggggagtgaagaattatttaaagaagggacctcaccggcggagaacacaacggaggangaaaacgatggtggtgttgaaaatagaagattgattgatgaatgaaaccattgggttttaacgacttan

SEQ ID NO: 18237 - DNA, 425 bp, Arabidopsis thaliana
  unsure at all n locations
  Clone ID: LIB35-023-Q1-E1-F2
agcagcaaatactatcatcacccatctccttagttctattttataattcctcttctttttgttcatagctttgtaattatagtcttatttctctttaaggctcaataagaggagatgggtgaannnnnnnnnnnnnnnnnnnnnnnnnnnnnnnnnnnnnnnnnnnnnnnggtctttgacgtggccagccacgatttcgtccctccataaccggcttttaaatgcttcgatgatgatggccgcctcaaaagaactgggactgtttggaccgcgagcgctcatataataactgcggttatcggattcggcgttttgtcattgggcgtggggcgattgcacaactccggatggatcgctgggcctgctgtgatgccaattgttcccccctggtaatcctttactcctccanacttcctaacgaatgg

SEQ ID NO: 18238 - DNA, 336 bp, Arabidopsis thaliana
  unsure at all n locations
  Clone ID: LIB35-023-Q1-E1-F4
agtcttctaaatcatttgggcgaaaagtccaaattaaatcaaaagatgttcaaagttgcaagagcgtcacagtatttggcgatcaccggtgctggtatcgaagacatcaagctttccaagaagtcatgggtgtttccatggcaatcttgcaccgtcttcgacgtttctccggtgaactatactttcaaagtccaagccatgaacgcagaaaagcttccttttgttcttccccgctgtttttacgattggtcctcgccgttgatgaccatgacgcccctgaattttgtatgctaaggttgaatttctcccncatgataaaagaatccaatccatgtc

SEQ ID NO: 18239 - DNA, 419 bp, Arabidopsis thaliana
  unsure at all n locations
  Clone ID: LIB35-023-Q1-E1-F6
ctatacttcactgtttgcaaaagaaattanccctgatcctaatcagtccgagttggacgactgattctcntgttgattgggatatcaagagtgtggatgganacaaaattggtaccaagccgtttaatggtaaactggangtgtantcaaaaggtttgagataccttttgangtatattaaggataactatggcgacccanaagttatcattgccgagaatggatacgganaanaccttggtagaagcacaatgacgtaaactttgggacacaagatnacaacaganaatattatatccacaggcatctcttgagtatgcacgacgccatttgcaangacacantgaacgttacnggatacnttgtgtggtcctttgatggaacaactttgaatngcaagattgggtacaaggcgaagt

SEQ ID NO: 18240 - DNA, 448 bp, Arabidopsis thaliana
  unsure at all n locations
  Clone ID: LIB35-023-Q1-E1-F8
cccacgcgtccgcccacgcgtccgcccacgcgtccgtacggctgcgagaagacacagaagggtacggctgcgagaagacgacagaagggtacggctgcgagaagacgacagaagggtacggctgcgagaagacgacagaagggcataaaaaaaaaaaacacaaaaaagtttcaatggccgcctcaacaatggctctctcctcccctgctttcgccggaaaggctgtgaacctttcccctgcggcatcagaagtccttggaagcggccgtgtgacaacgaggaagactgttgccaagccaaagggtcatcangcancccatggtacggattcgaccgagtcaaagtacttgggtccattctctggccaagtcaccaactacctttancgggagagttccctggaaacaacggatgggacacaagctggtccaatccgcngacccgagaa

SEQ ID NO: 18241 - DNA, 414 bp, Arabidopsis thaliana
  unsure at all n locations
  Clone ID: LIB35-023-Q1-E1-E6
tgatctgtcacggatcgtgagtaatttgaagcttgtggtgtttcctaatccgtatagggaagatcctgggaaagcacttagggattgggatctatggggaccttttttcttcattgtgttcttggggcttactctttcgtggtctgcttccgttaagaagtctgaagtatttgccgtggcatttgcactacttgcagctggggcagtgatcctcacactaaatgtgctgcttctgggaggacatataatctttttccaaagcctaagccttctaggctactgtctatttccgctagacgttggagcagtgatctgcatgttgaaagacatgtgatactgaaanatggtcgtngtgtcgtgactcctgcctggaactccttgggctgcttaaccctttcatgaagcgcccgcaat

SEQ ID NO: 18242 - DNA, 422 bp, Arabidopsis thaliana
  unsure at all n locations
  Clone ID: LIB35-023-Q1-E1-F9
gaagacgacagaagggagcctaagagaggacgaggacgtcctgtaggtagacccagaaagattggaacatcagtcacgactgggacacaagattctggagaactcaagaagaagtttgatatttttcaagagaaagtgaaagaaattgtgaaggtgttgaaggatggagttacaagtgagaatcaagcagtggtgcangccntaaaagatctggaagcactaacagtgacggagaccgttgagccacaagttatggaagaagtgcagccagaggagactgcancaccacaggctgaagctcaacaaactgaagctgctgagacacanggaggacaanaagaaggacaagantngagagggaaganacacaganccaagacagaagcagangcaatgcangangctctgttctgaagaatant

SEQ ID NO: 18243 - DNA, 401 bp, Arabidopsis thaliana
  unsure at all n locations
  Clone ID: LIB35-023-Q1-E1-G12
aagacgacagaagggaccttgaggaatcttgcaaaccaaaatgtgtgaagccacttctcgaatatcaggcatgtgtcaagagaatccaaggtgatgattctggccacaagcattgcactggccagtattttgactactggcaatgcattgacaaatgtgttgcaccaaagctgtttgcgaaactaaaatgaaaagaggtgaagctggagactctattgtcttgagtttgctacatgtggtttaaaattgatgtataaaatgcagtggatgttgaactttttttactgcaaaccagattgccaaatggctctgcttcttggttttgtttccatcgcaagtttgcgcttactacatttttttgctacttgagtaattgcatggcctaatagcaaaaaaaanaa

SEQ ID NO: 18244 - DNA, 430 bp, Arabidopsis thaliana
  unsure at all n locations
  Clone ID: LIB35-023-Q1-E1-G3
ctactcctaacaccagtcaaaaatcatctcaagatcagagcccagatcccaaaccgacgacaccaaccgggacgccgtcgacaactcctgccgaagatagtagtacgacgtggtcaccggtagatacatcaatgatatacgaaggagctttggatcaaaacaaaggatcaccgtccacgtgtcatctttcgttatgtggaatcacagtcacacttgcgctggccttttgtcggatgtggcggctcttttgacacctaactttgtctccccgcgtaaaacactgaagaatgtgggccctcactgacgaaaagccttatctcgttccgggccatgtgaancggttatcccgaacgacgtcngatgggtcaagggttaagaaaaaaagtttacaacacctacagntacnaaaatatccttcaatcatgttcat

SEQ ID NO: 18245 - DNA, 421 bp, Arabidopsis thaliana
  unsure at all n locations
  Clone ID: LIB35-023-Q1-E1-G5
gggcggacgcgtgggcggctgcgagaanacgacanangggggcagccgattcttctattacccgccatggtgaagtactcgcaagaacccgacaatcagaccaagtcttgcaaggctagaggatccgatcttagggttcacttcaagaatactagggaaacagcgcacgcaatcaggaagctaccattgatcaaggcgaagaggtaccttgaggatgtgatggctcacaagcaagcaattcccttcacacgtttctgcagangtgttgggagaactgctcaagctaagaacatgcactntaatggtcaaggacgttggccanccaantcngctcaatttgttcttgatttgctcaagaacncctgagangcanntgctgaaggtgaaaaggttttggatgttgatgccctcntcaatatca

SEQ ID NO: 18246 - DNA, 496 bp, Arabidopsis thaliana
  unsure at all n locations
  Clone ID: LIB35-023-Q1-E1-H10
tggttccctgcgcctaccgggccggaaatcccgggacgacccacgcgtccgtacngttgcgagaagacnacngaaggggacangagtcgagagagaaattagncatggngaccagagctttgctcgccgttatatatgcgtctccgaatcgctgctacatctctccgagcaggatcaaaatccaanctttaacttgttcttcttcaagtcattattacnaaagacagagtagaaaaaaccacagaatagctcgaagttactcgtctgactcggattcctccgttcttcagccgccggatgtggcccgtcttgctcagacagctcgaatctctctaactccggcggagatagangantgtgaaactaaaattcgtcgantcatcgactggtttgggcagcttcaacangtttgatgttaacaatgtggagccangctattanagnagaaaatgnatggtgggaaattttgcnaagaggatgctcccanaaaccattt

SEQ ID NO: 18247 - DNA, 442 bp, Arabidopsis thaliana
  unsure at all n locations
  Clone ID: LIB35-023-Q1-E1-H4
gcccaaccgcgcatacgatcgtcgacatcatggcggcaagagcccactagccaccccccccgaaccattgcgcctgggaccaataatccgccagatgattcacatttcccgagagaaccgattgtagttccgattccgacaaggtctctcgtttccacgtgtctgacagtcggaatgccgtttccatgctttgcgatccgtacatgccgacgcggcgcgattgggagatttccggattgcagtatcagccgggtcgacagtctcgtcccacgatgtgtgaccgtcgttctcatggtgcattctgtgcttcaacgcgcaatgggactccggaatcccgatntcgctgggccgttcnaagaaggggaaccctggaatgccgtctgaaccctgggcgtcatgacaantgctctggctaaggcaantccgatgccgtcgtccgggt

SEQ ID NO: 18248 - DNA, 431 bp, Arabidopsis thaliana
  unsure at all n locations
  Clone ID: LIB35-023-Q1-E1-H8
ggaggtaattaccannnnnnnnnnnnnnnnnnnnnnnnnnnnnnnnnnnnnnnnnnnnnnnnnnnnnnnnnnnnnnnnnnnnnnnnnnnnnnnnnnnnnnnnnnnnnnnnnnnnnnnnnnnnnnnnnnnnnnnnnnnnnnnnnnnnnnnnnnnnnnnnnnnnnnnnnnnnnnnnnnnnnnnnnnnnnnnnnnnnnncgtatgccggagaagctgttcanactcagcccggtcactacaacaatatattaaccaatcaccaccatgcgtgtattgcattatgtatgtatgattttaagttcaccatggtgcgtttgtatgaactgcctcangtttttgaggcactatncattaagaaganaactatgnggantaaacttttgattatgtaatgttttatgttggtttgagttgtaatacttgctgtttgcat

SEQ ID NO: 18249 - DNA, 447 bp, Arabidopsis thaliana
  unsure at all n locations
  Clone ID: LIB35-024-Q1-E1-A1
gcccacgcgtccgcccacgcgtccgcccacgcgtccgtacggctgcgagaagacgacagaagggggacttcgaaactttccgttaaaacttaaaagcaccttcctcataatctctggttactttgggaagaaaaatatcaattttggcgccatgtcagccttgtctgtgatcgaacaacgattgttaaagtgggacaagctcgcgtctttagtacccaaatcaaaaaaaactccttttccgattgatcgtcnaaacgagcttttgaaaagtctgtgctaattcaagttatccaagaattggagaatcgattcacgctcatttgaattgttaccaaacaagcatctagagctgaagacccttatcaanatnnaaatcccctgatcnatccctanggtgaaatgcaagaaaaactgttccgnngcncgcaagccgttcgacttaaangc

SEQ ID NO: 18250 - DNA, 483 bp, Arabidopsis thaliana
  unsure at all n locations
  Clone ID: LIB35-024-Q1-E1-A2
ggctccgagaagacgacagaagggtacggctgcgagaagacgacagaagggtacggctgcgaagaagacgacagaagggtacggctgcgaaaagaccacagangggtacggctgcgaaaagacgacagaaaggggaaaaccacaacaaacacaaaaatcnaaangggtcatttactatcttttaagagacgacatatatagttctcgaccaagaaaagaaaaaggggtgacctgagttcttcaacatataacataatggccncgagttttcaaaacggttacntttcctggttttggttttcnctgcccgtttgtttgtccttcnccggaaggactacnatgtttggtgaatgataccggaattggaccaaaacctaatggacccccaatttctaaaacnactttgggcctanccgnttaaaaactttccctttttggcgancaaanctcccaaattttaanttcccccccccngggaaaggc

SEQ ID NO: 18251 - DNA, 429 bp, Arabidopsis thaliana
  unsure at all n locations
  Clone ID: LIB35-024-Q1-E1-A8
ggctgcgagaagacgacagaagggtacggctgcgagaagacgacagaagggaagagaaaaaagaaattatggataactacagggaaaagctcaggtcaatcgattgtaaacactttagttttggagatgggaattgtccattcgggacaagttgcttctacaagcacactgtgaagccaggttcatatgcatggaaatatcacaggccacctccaaggcgtccacgtccctatggaactaacttctcagacgtggatacacttgtaaatatgatcgggaatataatttcagaaggtgaatatggtcctattgggtttagagatactgacgatgacgaactgactacaacggatatgatgatgttactgatgcacatggatatcgaatctgaagactcntccaatgangatagctattagctanccatat

SEQ ID NO: 18252 - DNA, 363 bp, Arabidopsis thaliana
  unsure at all n locations
  Clone ID: LIB35-023-Q1-E1-A8
ggaacgaagatcatgttgctattatcaaggattacagaggaaagattgaatccgagcttagcaaaatctgtgatgggattttgaatgttcttgaagctcatcttattccttctgcttcaccagctgaatctaaagtgttttatcttaagatgaagggtgattatcataggtatcttgctgagtttaaggctggtgctgaaaggaaagaactgctgaaagcactttggttgcttacaagtctgcttccgacattgccactgctgagttngctcctactcacccgataaggcttggtcttgcactcaacttcgctgtgtttnactatcaantccccnnctcgcctgatngtgctgcagcctcgca

SEQ ID NO: 18253 - DNA, 418 bp, Arabidopsis thaliana
  unsure at all n locations
  Clone ID: LIB35-023-Q1-E1-B11
ctgtaaaaaagatttanaaatgganactctgagtcgtttattggttttcatgtctctgttttccggtttagtttctggatttgctctgcaaaatcttccaatcacatcttttgaagaaagttacactcaactttttggtgacaagaacttatttgttcatcaagatggcaaatctgtccggttaacgctcgatgaaagaaccggttccggttttgtttcaaatgattattacttgcatggattcttcagtgcttcaattaaattaccttctgattatacagctggagttgttgttgccttttatatgtctaatggagatatgtatgaagaagaatcatgatgagatagattttgagtttcttgggtaacattagagaaaaagaatggagagttcaagacaaacatttacggtaatgga

SEQ ID NO: 18254 - DNA, 413 bp, Arabidopsis thaliana
  unsure at all n locations
  Clone ID: LIB35-023-Q1-E1-B9
ggctgcgagaagacgacagaagggtacggctgcgagaagacgacagaagggggaaacatttgagtacacagcaattatttgcagatcccacagtgcctccataacagagtacggtggtgtaggagacggcaagacgctaaacacaaaggccttccagancgccgttgatcatctcagccaatactcatctgaaggcggagcacagctctttgtacccgccgggaaatggctcaccggaagtttcaacctcacaagccatttcactctgtttcttcacaaagacgcaattcttctcgctgctcaagacttaaacgaatacccaattctaaaggctttgccttcgtacggacnaggacntgacgccgccggtggaagattcgctagtcncatcttcggcactaatctctccgacg

SEQ ID NO: 18255 - DNA, 435 bp, Arabidopsis thaliana
  Clone ID: LIB35-023-Q1-E1-A2
aaaataaaaaaataaaaatctctatcttcttcttcgtctcttctcatcctcctctcaagctccaatggcgagagttctagtctcgtctccatcttcattcttcggttcaccgttgattaaaccgtcgtcatctctccgtcacagtggagtaggaggaggaggaaccgctcaatttcttccataccggagtaataataacaaactcttcactacttcaaccaccgtacgattcagcttaaacgagattcctcctttccatggcttggattcatctgtagacatcggagcgattttcaacaagagctgaatctcttctctatacaatagctgacgcccgcccgttgtttggtgctgattccgttgtaactactgattcatccgccgttcaaaaaaattggtgggttggttttggtttaaccccgaagctaaggaaat

SEQ ID NO: 18256 - DNA, 412 bp, Arabidopsis thaliana
  unsure at all n locations
  Clone ID: LIB35-023-Q1-E1-C11
gaagggtacggctgcgagaagacgacagaagggtacggctgcgagaagacgacagaaggggatccactgagattcagccctttgtctctaagattcgataaananaaananaanatnaaaanacnaaaagcggccgctctanaggatccangcttacgtanccntncatgcnacgtcanagctcttctatantgtcacctaaattcaattcactggccgtcgttttacaacgtcgtgactgggaaaaccctggcgttacccaacttaatcnccttgcagcacatccccctttcgccagctggcgtaatagcgaagaggcccgcaccgatngcccttcccaacagttgcgcagcctgaatggcgaatgggaccgccctttaacggcncattaagcccggcgggttctggttgt

SEQ ID NO: 18257 - DNA, 417 bp, Arabidopsis thaliana
  unsure at all n locations
  Clone ID: LIB35-023-Q1-E1-C4
gacgttttaaattaaagccccaatagcaaagatagaaaaaagaaactttatttctcttagtaatacaataatccttatagaatgggtcaagcaagatatcttttttgtttgtttcccttgttaatcgttataaacttgtttctcaaaattatgtttctggttagtttaggagctnnnnnnnnnnnnnnnnnnnnnnnnnnnnnnnnnnnnnnnnnngcttgtaaggtttcaccgagaccttcgatctctgaggagactgtgaaagtagangataaagaatggtggaatagaatgtctgaatcgagcacaaagaagagtggtantancaatagcaacaacagtattaagggccgaaacancttaagggatgaaaaaagtnactgcntctcctttcccaacattcaagaaactaantcc

SEQ ID NO: 18258 - DNA, 422 bp, Arabidopsis thaliana
  unsure at all n locations
  Clone ID: LIB35-023-Q1-E1-C8
ggatttttcagtaaatggatagcctgacacgagaaagctgacctcactcgctacttgggttgattgtgtaaatatatgaaagtatcgtcgttgagaaattgggactctgatctgttgcagaaagccgaaagctttggtctttggagctctaacctctgcctctgaacacacacagaatctcccatggctgcatttgcaacggcagaagcgtgtgacagcaacgcagaactaatatcaaatggagacttacgcgctcttcacccaatcttcaagatctatggccaaagaanatgcntctcangaccaatcgtgactcccaaggtccttgaagacaatgtcctcgtcagaaaccaactngaaangaangggagaaagccgantcctagttatagacggtggtgaaagcatgaaatccncccttg

SEQ ID NO: 18259 - DNA, 406 bp, Arabidopsis thaliana
  unsure at all n locations
  Clone ID: LIB35-023-Q1-E1-D10
aaactgatcgggagataagagcggtaaaaaccaccgagtcacgactcagtgactcaaatcgttcttcccacacaaaaaaaatggttactgcgacagcatcaactccattttcactctcgtcgtccgtggttttcacgcgccgtcgtaatttcaaacgttttccagtttgcgccagtctttctccggaggtttctcctcttctcagagcagctcatcacactgtggataattatgtaaagagtgggatgattattggtttaggatctggagaagcttcagattttgctatacgttatttgggtcaacaacttggttctggttctttacataatgttgttggtgtaccaatgtctgctcgaagtgcgagtgaagcagcanagtatggaatccccttggaatattaccg

SEQ ID NO: 18260 - DNA, 355 bp, Arabidopsis thaliana
  unsure at all n locations
  Clone ID: LIB35-023-Q1-E1-D11
agaagggggaacctccgatttgactgcaccgtcggagctcgacgctgagctaagcttaaccaaagagctgtcgtatattacactagcagtgaagatcgaatcttaaaaccatggcttctccgaccaattcacagaaaacagtttcggatgacgaggaagttgattactccatcaaaccggagttctatgattcanatattgatgatnaanatgagctttggatggataagaagagaagatggtcgtacttttgatgctcttcttagctgtccaacttgtttcaccactgtctgcttagagtgtcagagggcacgaacaagtnngtgacanattcaggaccactcctttgtggnca

SEQ ID NO: 18261 - DNA, 410 bp, Arabidopsis thaliana
  unsure at all n locations
  Clone ID: LIB35-023-Q1-E1-D12
ggctgcgagaagacgacagaagggtacggctgcgagaagacgacagaagggtacggctgcgagaagacgacagaagggtacggctgcgagaagacgacagaagggtacggctgcgagaagacgacagaagggtacggctgcgagaagacgacagaagggtacgatagacattgaatctgtgccaaagttccttaccactctcagattgttggatctttacaaccaccccggtgaatatgtggcaatgaattcagagatctccagcgcaatgcgagctgagaacaaagaatttctggagaagatggaaagctacgaaacaccaatgtcatgcttcaagaacaacaaaggagattccattcttcaccttgctgctgcttttggtcatcttgagctagtaaagagcatantct

SEQ ID NO: 18262 - DNA, 402 bp, Arabidopsis thaliana
  unsure at all n locations
  Clone ID: LIB35-023-Q1-E1-D3
ccccaaacacacacaaactaaaaaaaaggcaaaaccctagatccaagatcagacctaatctaatcgaaactcatagctgaaaaatgaagagagatcatcaccaattccaaggtcgattgtccaaccacgggacttcttcttcatcatcatcaatctctaaagataagatgatgatggtgaaaaaagaagaagacggtggaggtaacatggacgacgagcttctcgctgttttaggttacaaagttaggtcatcggagatggcggaggttgctttgaaactcgaacaattagagacgatgatgagtaatgttcaagaagatggnttatctcatctcgcgaacggatactgttcattaaaatccgtccgagctttaatcttggcttgatataagctctctgagc

SEQ ID NO: 18263 - DNA, 437 bp, Arabidopsis thaliana
  unsure at all n locations
  Clone ID: LIB35-023-Q1-E1-E1
aaggaaggcttgacagcaccggtcaggttgttgctgttaaacaactagacaggaatggtctacaaggtaacagagaatttctggtagaggttcttatgctcagtcttcttcatcatcccaacttagtcaaccttattggttattgtgctgatggagatcaacgcctcttggtctacgagtttatgccgttaggatcattggaagatcacctccacgatcttccaccggataaggaggccttatattggaacatgagaatgaaaatagctgctggtgcggcgaaaggattggaatttctacatgataaggcaaancctccgggttatttataganattttaaagtcatcaaatanttttactggaataagggtttccaaccctaaacctttctgantttggaccttgccaaaactccggaccaaacgggaagacaaaa

SEQ ID NO: 18264 - DNA, 407 bp, Arabidopsis thaliana
  Clone ID: LIB35-023-Q1-E1-E10
gtgaccaggcccgggcgactgtttaccaaaaacacaggtctccgcaaagtcgtaagaccatgtatgggggctgacgcctgcccagtgccggaaggttaaggaagttggtgacctgatgacaggggagccggcgaccgaagccccggtgaacggcggccgtaacaataacggtcctaaggtagcgaaattccttgtcgggtaagttccgacccgcacgaaaggcgtaacgatctgggcactgtctcggagagaggctcggtgaaatagacaaaattggttgtggtcttgattttataatggtcgatcggcatccacaattcaggcactcaagatgcctctttgttgtgagaacagatggtggatggatagatttctcgtaccaaaagtgtcttcgagcctatgttcga

SEQ ID NO: 18265 - DNA, 336 bp, Arabidopsis thaliana
  unsure at all n locations
  Clone ID: LIB35-023-Q1-E1-E2
acaaacctttaccagctcttctacagcacggagagattcgtcggagatagcaaacatggagaagaaacgcgaaggagtaatcgaaggaatgagtcggatcgtatcagatccttactacttcctccatttcatggcctttttctcttacctcccgattcgtagctccgccgcaccgtacacttctcatcgactcttcgacagagaaaatccaagcatttctagcgtttcctaagttttccgccaataanatggtgaggggaggaaacattgggaaacnttcgttgctgatagtttactcctatgctaagatctttctaattgccgtttccgttgaat

SEQ ID NO: 18266 - DNA, 415 bp, Arabidopsis thaliana
  unsure at all n locations
  Clone ID: LIB35-023-Q1-E1-E4
ggatttcaatttttgtttgagagagagagagagagatggtgacgaangagcaagtcgaagcttcattgacttcgaaacttaagccaattcatctcgaagtcattgacatatctggaggttgtggttcgagttttgaagtggaggttgtctctgaacaattcgaagggaagagattgctggagaggcatcgtatggtgaatgcngccctaagaagaananctgaaagagattcatgctctctctantaananagctcagactccacaacaatggaagccaccatcacaagactctgcaaccttaancagagatgcctgaatttctgttttttaaaagccttgtgacaaataacaagagcatttactaangttgaataccttgtgggtaactggtactccgaattaactgcntttga

SEQ ID NO: 18267 - DNA, 349 bp, Arabidopsis thaliana
  unsure at all n locations
  Clone ID: LIB35-023-Q1-E1-E5
tcacgaagacgacgagtgaagaagaagaanaagcaatggggagaaagaagggattaccggagttcgaagagtcggcgccggatggctttgatccggaaaatccatacaaggatccggtggcgatggttganatgananagcacatcgttcgagagaaatggatccaaatcnagaaggctaagatcttgcntgagaaggtcaaatggtgttaccgcgtcaaaggagtcaatcactatcagaaatgtcgtcatcttgttcagcagtatcctcgaattccactcgcnggcgtccgttnnangaaaggatcatcgtccctatttcgctccgcnggtcccaanccggaagctgt

SEQ ID NO: 18268 - DNA, 461 bp, Arabidopsis thaliana
  unsure at all n locations
  Clone ID: LIB35-022-Q1-E1-D2
gtgaccaggcccgggcgactgtttaccaaaaacacaggtctccgcaaagtcgtaagaccatgtatgggggctgacgcctgcccagtgccggaaggttaaggaagttggtgacctgatgacaggggagccggcgaccgaagccccggtgaacggcggccgtaactataacggtcctaaggtagcgaaattccttgtcnggtaagttccgacccgcacgaaaggcgtaacgatctgggcactgtctcggagagaagctcggttaaatagacatgtctgtgaagatgcggactacctgcacctggacagaaagaccctatgaagagatttgggggaaggtccaagtggcatgangcanttccttacaattcctgttgtccataataagttttgaaacatgctccaacctggttaaccgttttgaatgaaatgacaagaacttnaaatggttggttnaaaccctt

SEQ ID NO: 18269 - DNA, 775 bp, Arabidopsis thaliana
  unsure at all n locations
  Clone ID: LIB35-022-Q1-E1-E10
aaaancctggggggtttttttcggccccccttgggnggancntttttaaacccggggggggtncccccgggggaaaaaaaattttccccccgggggggaaaatcccggaaancccccnaaacgggcccgggtttncccgggttttaacggggggccnttgggcccgaaaaagaaaaaaggaaaaccgnnnnnnnnnnnnnnnnnnnnnnnnnnnnnnnnnnnnnnnnnnnnnnnnnnnnnnnnnnnnnnnnnnnnnnnnnnnnnnnnnnnnnnnnnnnnnnnnnnnnncttccnatttttncttcccaaacaaattcctttgaagaaagaaaannnannnanncaaagaangcnaaaggtttataatttaagaaggaattctcnattgggccgaattgggccgggtcctcccggggaagcctggtccctcaagttggggccttgggttcttccgttccctcaaccgggaagggcaaagaagaaggtgccaccgcattgacaagcggcgtaggcactgggagctcagagagttggcaggaaaactcttattgtcgctgctgcggctgctcagcctaagaaatcttggatcctgccgttaaaggtggtggcaacttccttgaacctgaatggctcgatggctcgctancaaggaagattttcgggttcgaaccattggggtttgggggaaaagaacccgggcttttcctgaaaatngtacaagaagaaggctgaactgattcatggcccgatnggccaatngcaaccggtttctttg

SEQ ID NO: 18270 - DNA, 503 bp, Arabidopsis thaliana
  unsure at all n locations
  Clone ID: LIB35-022-Q1-E1-E11
caaagctctnctgagaagttgaagtccgatattaanggggggttttanccgtttgaaaacataataantgaatnccttngttngnttcttaantacnaaacaaantgtttggaaactaaatggttcaggganaccaaacaagtttgaaatactccaatccgaaggaatatgccaaaatcatgtcgaccaacttagaatccgctttccatttatctcaaattgctcatcctcttctaaaagcatctggtgtcggaagcattgtgttcatctcctctgtanctggcctggtgcatcttagcagtggatctatctatggtgcaactaaaggagcacttaatcagcttacaagaaatctagcttgcgagtgggcaagcgacaacatcagaaccaattgcgtggcgccatggtacatcaagacctcacttgtggaaatgctacttgagaacgaaagaatttgtggangctgtaatttcanggaccccactttggcgcgtttgganaaa

SEQ ID NO: 18271 - DNA, 505 bp, Arabidopsis thaliana
  unsure at all n locations
  Clone ID: LIB35-022-Q1-E1-D12
tgcaacggntctcgcctggcccgtaaaggtccggaaagtcccggggtngacccacgantccgtacaagntgcgaaaagacgacagaagggggacgaacatanaaacaaaaacatataatttgggtttttagagttcgaaacttganatcntttttttttggttgctgaggaatcgaagtagaagagtataaatgggtgttagagagaaagatccgttancccagttgagtttgccaccaggttttagattttatccgacagatnaagagcttcttgttcagtatctatgtcggaaagttgcaggctatcatttctctctccaggtcatcgganacatcgatctctacaagttccatccttgggatttgccaagtaaggctttgtttgngagagaaggaatggtattctttagcccaanagatcggaaaatatccgaacgggtcaagacccaatagagntacccngggtcgggtattgggnaaancaacgggtactgacaaaaatt

SEQ ID NO: 18272 - DNA, 480 bp, Arabidopsis thaliana
  unsure at all n locations
  Clone ID: LIB35-022-Q1-E1-E4
gcgtccgtacggctgcgagaagacgacagaagggggaaggtttcgtttcgtggggaagaagatgaagtcgcttgtggctcatttctcaacgcctttaatcaccgctagattagttcctagatgtatcatccatcgagcttcaatctccgccgtctctttttccaccgtccgccgtcgattttctcctctcaccatggcctcagcagctcagtcttcttctcaggctgtgtcttacgggagtggcaacagtgatacagatgtttttaaattgattcaagctcacgaggagaaggctgctcgtctttccccagtcgaagaaatccgaactgtgcttaatggtagcatatgcggtatgctttccactttttctcagaagtatgaaggttatctttcanggtcaatggttgattttgcatgtgatgctgatggttctccgaatcctggcagttaataacttggcagttcatacaaaaggatttc

SEQ ID NO: 18273 - DNA, 453 bp, Arabidopsis thaliana
  unsure at all n locations
  Clone ID: LIB35-022-Q1-E1-F1
cctgnacctaccgctccggaantcccgangtcgacccacgcgtccgtacggctgcaagaagacgacagaagggtacggctgcgagaagacgacagaagggtacggctgcgagaagacgacagaagggtacggctgcgagaagacgacagaagggtacggctgcgagaagacgacagaagggtacggctgcgagaagacgacagaagggtacggctgcnagaagacgacanaagggtacggctgcgagaagacgacagaagggtacngctgcgagaagacgacagaagggtacggctgcgagaagacgacagaagggtacggctgcnagaagaccacagaanggtacggctgcgagaagacgacagaagggtacngctgccaagaagacnacagaanggtacggctgcnagaagacnacagaagggtaccgctgccaagaagacgacagaaggg

SEQ ID NO: 18274 - DNA, 536 bp, Arabidopsis thaliana
  unsure at all n locations
  Clone ID: LIB35-022-Q1-E1-F10
gaactggtttcgcctgggccntacngtgnccgggaaaatcgcggggancgacccacgcgtccgttacctgcgangaaagacgacagaanggggaagaaanntccttgtccttggatgantgcnttcctcctccaacatcgtcgtcaaatgggaaacgaagaaatcctttgatctccccctctcaatcgtctctctctctgtcgccatctccgccgtcgtcaatgggaaacgaagaagtcgaagcccaccgtgtcgtactctgaaaaatctgagaagtctcttttcgtctttgatcaaaagttgatcgtctctcatctctttgtctggtacatggattctttgattggggtttcttcctcatgttagagttcctcctangtcgagatnaaaaccttcctangtgctcttcgctttcactgcccccaatctcttccttctccgcttgtgttctgaaatcatcatcgaatggggctgacataaaaggatgttgggaaaaagtaattcaaccaaatcacgaantcatcattcatcccgcg

SEQ ID NO: 18275 - DNA, 505 bp, Arabidopsis thaliana
  unsure at all n locations
  Clone ID: LIB35-022-Q1-E1-F12
catgcccacaggtccggaactcgcgggncgacgcaagcctcnntactgagtcgaaanaacgacagaagggtccggtcaaatctcggtggtctttctcttcatccaagaaaagtttcggaagcaaagatgaaacctttttcgattcgcagccatggctacaatctgactccgacgatgatttccacagcgtaaatggcgatttcactccatcactcggaaacactcctaagagcagcttctcagataggccaccacgtttccacaaccttatattccacgagaagaagccttcccgaggctcgtcttctccagcgccacttccaaggaggaagaancttggtgagcttttcagagacagtataagagaagaacgagaagaaagcggttcatcgtcagctataagcactccttatctatcangtgctaactcacgcgaattcaatgacaccgccatccnaanaggaanagaagaagaaatttaactggcatcatcatcgttgtcctc

SEQ ID NO: 18276 - DNA, 454 bp, Arabidopsis thaliana
  unsure at all n locations
  Clone ID: LIB35-022-Q1-E1-F2
agaaggggaacacaagcgatactgagctgaagtttctctcagagctgataaagacaggagctatctgctcagttgatgaactgtttcttcactgcacaggctacagcgactgcaccggtatcattaaaagcctcagaaacagtggcgtctttgtccatcaatggtgggaagactaataagcttaacaaatgaagctttataaactaaaactatgttgtttggtaagttggtgttgttttgttttccaatccttgctcatgtatagagcaaagccacagaagtttgctccagcgacccagcacttctgtggttctacctaaataagctgtcgtcgttatgaactttgttttgtgtgtttgttcaatgaagtttgctatgttgtgtgtttctactggttttcatgctccgtttcacaaaacgcttatagtancaaagtagcctgacganttaacaa

SEQ ID NO: 18277 - DNA, 525 bp, Arabidopsis thaliana
  unsure at all n locations
  Clone ID: LIB35-022-Q1-E1-G3
gaactgggtttgcctgtgccctacngctccggaaatcccgangtcgacccacgcgtccgcccacgcgtccgtacggctgcgaggacgacagaagggtacggctgcgagaagacgacagaagggtccactgttgttaagttgcagagcgccatcaaattcaacggcggaggtcatgtcaaccattcgattttctggaagaaccttgctccttccagtgaaggtggtggagagccaccaaaaggatctcttggtagtgccattgacgctcactttggctcccttgaaggtctggtgaaaaagatgagtgctgagggtgctgcagtgcaaggctcangatgggtgtggctcggactagacaaagaactgaagaagctagttgttgacacaactgccaatcaggattcattagtgacaaaaggangaagcttggtacctctggtgggtatagatgtttgggaacacgcctactacttgcagtacaaaaatgtgangcctgantatctgaagaatgtatggaaagtgatn

SEQ ID NO: 18278 - DNA, 473 bp, Arabidopsis thaliana
  unsure at all n locations
  Clone ID: LIB35-022-Q1-E1-G7
gcgtccgtacggctgcgagaagacgacagaaggggaagagggaagacacagtcctctcacaactcttccacttctctctttcctacaaatttctcgttcctcccgacctctcctcgccgggaaattgtgtagcatttgtctataaatgggtttggattctaaagaagctgatttggaggtaataagaagatgagaatcctgaagcaacactgtgtgttacatgcgttttcagatttaaccaaggtgtcncnggtggggtcctaaanccaacccaagaatngcaataacatggnacctnaagggaacaaaaaaatttcaagccttacngttnccaagttcaancagttccaaccaaataanctcaaccangaactggctactttcnantaataaatggcccactttaattcccttaattggggtanaagggnaaaggtttantcanttagttanatcaactccttcgncggctt

SEQ ID NO: 18279 - DNA, 529 bp, Arabidopsis thaliana
  unsure at all n locations
  Clone ID: LIB35-022-Q1-E1-H3
aactggttgcctgtgcctaccgctccggaatcccgngtcgacccacgcgtccgtacggctgcgagaagacgacagaagggcccgagcacgagacaccaacggtcgcaacagaggaatcaccagcgacgacaacagaggttacggatcgtggattgtttgatttcttggggaagaaggaataggaagtgaaacctcaagagacaacgacgctcgagtctgagttcgatcataaggctcagatctttgaaccggagttagctgcggagcacgangaagtgaaggagaacaagattactctgctagaggagcttcaagaaaagaccgaggaagatgaggagaacaagcctagtgtcatcgaaaagcttcaccgatncaacagctcttcttcctcttcgagcnnnnnnnnnnnnnnnnnnnnnnnnnnnnnnnnnnnnnnnnnnnnnnnnnnnnnnnnnnnnnnnnnnnnnnnnnnnnnnnnnnnnnnnnnnnnnnactcccangacaccacgacaagacagcaagaggatga

SEQ ID NO: 18280 - DNA, 413 bp, Arabidopsis thaliana
  unsure at all n locations
  Clone ID: LIB35-022-Q1-E1-H4
gcctccgtacggcgagaagacgacagaagggtacggctgcgagaagacgacagaagggtacggctgcgagaagacgacagaagggtacggctgcgagaagacgacagaagggtacggctgcgagaagacgacagaanggtacggctgcgataagacgacagaanggtacggctgcgagaagacgacagaanggggactcntgtttgtttantgaagcgatcaagtgagcgagatcagtcaaatagctttttcattgttcctcagatcgangannaanaagaagagcttagcaacaattggcggcgaaaccgattgcnagtccgattccggtggcgctgtaccgacttatcgtgtcaccttcnattgtctctcatancgctatctctcatcatgaactacatcatcaagnaaaa

SEQ ID NO: 18281 - DNA, 432 bp, Arabidopsis thaliana
  unsure at all n locations
  Clone ID: LIB35-020-Q1-E1-B2
acagaggagtctgagaaaatggatgaagatagccgactgattgaagaactccgccagactaatgaatatcaaaggtctcagatatcacacttggagaaaagtcttaagcaggccatctcgaatcaggaggataacagattgagcaatgacaaccaaatccgaaaattaaaggacacagttgatgacctaaatcaaaaacttacaaattgtttgagaacaatcgagtccaagagtgttgaacttttaaatcttcaaactgctctaggccagtattacgctgaaatcgaagctaaggagcattttgaacgaagagcttgcgatggctaaaagacgaattgatgaagctttctgctcgtttgaaaagattctgatnagccgttagagtcatcaaataaagaanaggaagatgtcacatccaaaattattgcatgc

SEQ ID NO: 18282 - DNA, 430 bp, Arabidopsis thaliana
  unsure at all n locations
  Clone ID: LIB35-020-Q1-E1-C12
attcgtggaattgtctttcagaaagaaaaaaacttggaagcagcagagaatcacactgaagctgaacaaactgaagattttgatccacagattttcttaagaaatcaaccagaattagctgatgtggtattcaattatttcccggatatgcagcagcctagggactctccgaaaaggaaggcggtaacccttgttcttgatttggatgaaactctggtccattcgactctggaagtctgtagagatacagacttttccttcagagtcactttcaatatgcaagagaacactgtttacgtgaaacaaagaccatacctttataggttcttaagagagggtggttgaactttttcatgttgtcatcttcacggctagtcacagcatctatgcgtctcagcttctagatatattggattcagatnggaagttt

SEQ ID NO: 18283 - DNA, 379 bp, Arabidopsis thaliana
  unsure at all n locations
  Clone ID: LIB35-020-Q1-E1-C7
gagagtaatgaagagtgaagtgttatattgttctctcgtccacttccactctctcttttaactcttacttacttcctcgtaaagatcattacatataatnaataatatatttatgtttgtgttatatttaataacagtaaaaagttttaaaacgttgaacaaattagccgacatagantacaaaagagggttagcatcngggggagaaacgtggaccaacatgatacaccctccaaaatatccccaagtttgaacatngacatgttcgctttttctttccgtggtaacttttttttcngtgggtcacattatttanaattgtanncaagcagctattttacatggagattcctgtcggtataccgcctcattnctcaac

SEQ ID NO: 18284 - DNA, 504 bp, Arabidopsis thaliana
  unsure at all n locations
  Clone ID: LIB35-020-Q1-E1-A4
ggttgcctgttcctacngccccggaantcccgnntcgacccacgcgtccgcccacncgtccgcccacgcgtccgtacggctgcgagaagacgacagtagggggatggagaaaattatggagtatctgcaattgagcgatgaggtggttgacgacggtgaggcaccgcgagttgaagaatttttaggtgaagggaaaagcttctacgagaattttagtctcagaggaatccgagtcaaccgagtcgaaccgggtttcatttcctgctctttcaaggttcctcttcgtttgacggacagagacaagaatttagcaaatggtgcgactgcaaatcttgtggatgaagttggtggagcacttgtacatggcgaaggcttacctatgagtgtttcagtggacatgtctattgcattcctttcaaaagctaagcttggtgangagttggagataacgtccanattgttangagaganaggaggttataaaggaacaatccgttgtatcaa

SEQ ID NO: 18285 - DNA, 508 bp, Arabidopsis thaliana
  unsure at all n locations
  Clone ID: LIB35-020-Q1-E1-D1
tggtttgcctgttccctacggccccggaaaatcccgantcgacccacgcgtccgcccacacgtccgcccacgcgtccgtacggctgcgagaagaacagaagggtacggctgcgagaagacgacagaagggtacggctgcgagaagacgacagaagggtacggctgcgagaagacgacagaagggtacggctgcgagaagacgacagaagggtacggctgcgagaagacgacagaaggggaatctactgagggttctatctatattaatccttctctgcttccttcaatctaattgcaaatcaaatggatcgtcttaagctttatttctccgttttcgttttgtctttctttatcgtctcggtttcgtcgtctgatgtcaacgacggcgatgatctcgtgattcgtcangtggttggtggagccgaaccccaagtttttgacctcagangatcacttttctctccttcaagcgggaanttcnggaaagtctacgccttccaacgaggag

SEQ ID NO: 18286 - DNA, 503 bp, Arabidopsis thaliana
  unsure at all n locations
  Clone ID: LIB35-020-Q1-E1-D10
cggttgcctggcctaccggancggaatccgggtcgacccacgcgtccgtacggctgcgagaagacgacagaaggggggagccgaagtgttgttttcttatagaaggattttgatttcttctgcaaaattcgaccgatagtgacgagaaagatcctaagatggcgaccgcaagcgagagttcttcatctaagagatggcttccacttgaatctaacccagatgttatgaatcagtatctctggggacttggtcttgcccctgatgaagcagagtgcaatgatgtgtatgggttagacgatgaacttctagagatggttccaaagcctgttcttgctgttctcttcctttacccaatcaccaaaaagagtgaagaagagagaatcgaagcaaagacaaggaaattaaggaaaaggtgcatagcgataaagtttactttatgaaacaaactgttggtaatgccttgtggaaccattggtcctcctcaagctattggggaaatatac

SEQ ID NO: 18287 - DNA, 450 bp, Arabidopsis thaliana
  unsure at all n locations
  Clone ID: LIB35-020-Q1-E1-D9
gcgtccgtacggctgcgagaagangcanaagggtacagatgaatgttcaanaagaactaaattgtgtcaatngaaaactcaacattgcnattaccaggaatttccaanccgtatggggatcctaanattcttgcanaatttatcgctggacaattanaaaatcgcgtttcttttcgaaaancaatgacanaagctattgaattaactgancaggcgaatacacanggaattcaagtacaaattgcaggacgtatcgacggaaaagaaattgcacgtgttgaatggatcatagaaggcagngttcctttacaaacaattgaagctaanattgattattgttcctatacagttcgaactatttatggggttttacgaataaanatttggatattcgtagacgaagaataanaaaacttccttaaccttaanctttatccgacgattanacca

SEQ ID NO: 18288 - DNA, 498 bp, Arabidopsis thaliana
  unsure at all n locations
  Clone ID: LIB35-020-Q1-E1-E2
ctaccgccccggaaatcccgnatcgacccacgcgtccgctgcgaagaagacnacagaagggtacggctgcgagaagacgacagaagggtacggctgcgagaagacgacagaagggtacggctgcgagaagacgacagaagggatganctgtggtanaanggccaanccccatgtttcattgcttgtactacactcntcgaagggtttaggaaatcaggaagaacagagaaagcgtcagggtttatggagaagatgatgaatgcaggaattcttcccgatagtgtgacatttaacttgcttcttcgggatctctgcagttctgatcattctactgatgcaaacanattgatacttttggcatcaagcaaaggatatgaacccngatgagacaacgtaccatgttttggtttcngtgttcacgatagaangnanaccaaangagangagaaattctagtgaacgagatnttggntaaanatatgttgcctgatatcctta

SEQ ID NO: 18289 - DNA, 426 bp, Arabidopsis thaliana
  unsure at all n locations
  Clone ID: LIB35-020-Q1-E1-F10
acagaagggggatgcgatcataccagcactaatgcaccggatcccatcagaactccgcagttaagcgtgcttgggacctcagactgagaatcgcccaagatgcagctcgcggattaacatacctgcatgaagaaatggagtttcagatgatattccgcgatttcaagtcctcgaacattcttttggatgaggactggaaagcaaagctctcagatttcggtttggctcgtttaggtccatctgaaggattaacccatgtttctactgatgttgtaggtacaatgggttatgcagcacctgaatacattcaaaccggccgtctcacatcgaaaagcgatgtgtggggttatggagtcttcctctatgagcttatcactgggangcgaccggtgggacagaaacagacccaagggagagcagaatcct

SEQ ID NO: 18290 - DNA, 428 bp, Arabidopsis thaliana
  unsure at all n locations
  Clone ID: LIB35-020-Q1-E1-F11
gcccacgcgtccgtacggctgcgagaagacgacagaaggggattcaggacatggctaaccgaacagacaactcgaatcgctgttcgaatggtaaaaagccaaatgatggaatgagactcattatagcgacattcgtaggaatagttgtcggtttcttcttggggatatctttccctacactatcactaacaaaactaaattttccctctggcattcttccctctgttgatattacttacgtagaagatgagacaccagaaacatcgagtgaaacgcttttgcatacatggtcatctaggggtccgttacatggggctaattcaagtgatgcaccgcattggaaagatttgggttccatcgaatccccgangtgcagagatgctgactcctggtatcattgcacctgaatcangttactacttacgcag

SEQ ID NO: 18291 - DNA, 461 bp, Arabidopsis thaliana
  unsure at all n locations
  Clone ID: LIB35-020-Q1-E1-F12
gcgtccgtacgagctgcgagaagagacagaaggggagagcaaccaaaatgcaactccaaacccaatccttcgctctcaatcttctgccatctccaaatttcgccaaacccatcgagagacgtgaattcatctctctaaaacgagacccatctcgtccaatttcactccgatgttccgtttccacgactttggatactccggcgaccgcttcgacccacaagccctttccggcggaggtttcaaggagtatcatggagctttcatctgttggaactctctccactttgacccacgacggttggcctctcggcgtaggagttcgcttcgccgttgacaaagatggcactcctgttctttgcctcaatcgctctgtctctcctgacaagaggtctgctcttcatgttcagttagaacaatgtggattgangactcctcagtgtacgatacaaggtancattggt

SEQ ID NO: 18292 - DNA, 430 bp, Arabidopsis thaliana
  Clone ID: LIB35-020-Q1-E1-F5
agaaggggaagcaagagagtattttggggaagctcttcttcatggagcttgaattctcactctgctactgctaaatcgatgttagatagtgcccatcgccagtattctactcactctccatcggaaaccaaatcacagaaaatgctctattacctcaccgctgttgtctttggtatggtggggttaacttacgctgctgtgccattgtatagaacattctgccaagctactggatatggaggtactgttcaacgcaaagagactgttgaggagaagattgctaggcattcagaatctggtaccgtcactgaaagggagattgtggtgcagttcaatgctgatgttgcagatgggatgcagtggaagttcactccaacacaaagagaggttagagtaaaagccagggagaaagtgcactcgcattttacac

SEQ ID NO: 18293 - DNA, 486 bp, Arabidopsis thaliana
  unsure at all n locations
  Clone ID: LIB35-020-Q1-E1-F8
cggattacncgggtcggcccacgcgtccggctgnaagaagacgacagaagggtacggctgcgagaagacgacagaagggtacggctgcgagaagacgacagaagggaagactatggatcagcccgtcaccgcttacccgcccggacacggtgcaccgtctgcataccctgctcctcccgcgggtccttcttccggatatccaccacaaggacatgacggtaagcacgatggtgtttatggatacccgcagcatgctggatatccagctggnaccggtggttatccgccacctggtgcatacccacaacagggaggttaccctgtgatatccgcctcagcancagggtggatanccgggttatccgccacagggtccatatggttacccgtancanngtttatccaccacatggtccatactgttaccccgcnanacgcatagctcatggtaaaccgcanaaaccgaacaatcatggtaatngctgg

SEQ ID NO: 18294 - DNA, 462 bp, Arabidopsis thaliana
  unsure at all n locations
  Clone ID: LIB35-020-Q1-E1-F9
gcgtccgtacggctgcgagaagacgacagaagggggaaacagaacatagaacgaaagaaagaatggcttctgtaccatgttccttcaagctctctgctcatcgtagatcttcttccaagcttgatggaaacaacaaacagtgtagtagtttagtagaaagactgagagataaaacgaagagtcaagttcctaagtccattacttgcattaaccgcttagagatatcgcgtatagcaccattacacgcaacgatgaatagcccgaaaggatttggacctcctcctaagaaaaccaagaagtcgaaaaagccaaaacccggaaaccaaagnnnnnnnnnnnnnnnnnnnnnnnnnnnnnnnnnnnnnnnnnnnnnnnnnnnnnnnnnnnnnnnnnnnnnnnnnnnnnnnnnnnnccaacagaatgataagcaagaatgggatttacagtggggttaccactcct

SEQ ID NO: 18295 - DNA, 459 bp, Arabidopsis thaliana
  unsure at all n locations
  Clone ID: LIB35-020-Q1-E1-G11
gcgtccgtacggccgcgagaagacgacagaaggggatgtttggaacttcttgaggactatggatgttccggttaacacattgcatgcggcagggtatatatcgattggatgtgagccttgcacgaaagcggttttaccgggtcagcacgagagagaagggagatggtggtgggaagatgctaaagccaaggaatgtggacttcacaaagggaatgtcaaagaaaactccgatgatgctaaagtgaatggggaatcgaaatccgctgttgcagatatctttaagagtgagaatcttgtgactttgagcaggcaggggattgagaatttgatgaagttggagaaccgtaaagagccttggatcgtcgtgctttaagctccgtgggtgccccttttgtcaaaccatggaaacatcgtatgaanaactggcngataaattggctggnaattggattaagggtg

SEQ ID NO: 18296 - DNA, 508 bp, Arabidopsis thaliana
  unsure at all n locations
  Clone ID: LIB35-019-Q1-E1-F12
ctttgcccaggcnctacggaacggnctatccggntcgacccacgcgtcngcgaaaagacgacagaagggtacngctgcgagaagacgacagaagggtacggctgcgagaagacgacagaagggggattgaaagatgtcaaggcttcttcagattctgttgctttaactgcaaatttcatttttgtggcgcgtgattctaagactggtaaagctgctcctatcaaccgtctttctcctgaaaccgaggttgagaaacttctctttgaggaagttgaagctaggaataacttaaggaagaagaagagaggaggtgacagaagggaatttgatcacggggagtgtaagaagcttgaggcttggttggctgaaggaangattttctctgacatgccagctcttgctgacagaaacagcattcttcctaaagacactcgtccctgagaattcgctgatatgccaaccgcaacaaaaggaacatccaaggtaagatttttggangggtttttaa

SEQ ID NO: 18297 - DNA, 465 bp, Arabidopsis thaliana
  unsure at all n locations
  Clone ID: LIB35-019-Q1-E1-F3
gggtngccccccgcgtccgcccaanaatccgtacggctgcgaganaacgacagaagggaaaacaaaaaatggctacccgaaaagctctgatcaacgttcaccggatcattcgctccaccgccgtggttggccggagctctatcattcctgccgccgctaaccggtcatatcctattatattccggaatggagttgatttgggggcgagattcttccgtgagaacactgcgtctgcccagaatttcgatattgatctctctaacgaagagaataagagaagaacgatnaacagattgttgtatangagcaatcaaanaagggttttgggaacttgatcntgttttggggaaatgggttgaggagaatgttaattccatgggcgaaaatngtgttaaatccctaaatcaagtccncaatttgggaaaacctggnttccgggaaatgggtaactgaacaggngcaacc

SEQ ID NO: 18298 - DNA, 503 bp, Arabidopsis thaliana
  unsure at all n locations
  Clone ID: LIB35-019-Q1-E1-F10
gttncttgccagcctacggaaggtattccgggtcgcccacgcgtccgtacanctgcgagaagacgacagaaggggataattcgaacccttcaagattttcttctctctatctctctgtttctctctgtttctgagatgggtttgtttggaacgaagaagatcgggaagtatgagataggaagaacaatcggagaagggaatttcgcaaaagtgaaacttggttacgacacgaccaatggtacttacgtagctgtcaaaatcatagacaaggctttggttattcaaaagggtcttgagtctcaagtcaagagagagatacgaacgatgaagcttcttaaccatcccaacatcgtccaaatacacgaagtgattggaaccaagacaaagatctgtatagttatggaatacgtttcaagtggtcagctttcaaacagacttggaagacaagaaaatgaaagaatcagatgctagaaaacttttccaacaattgantgatgcgttga

SEQ ID NO: 18299 - DNA, 487 bp, Arabidopsis thaliana
  unsure at all n locations
  Clone ID: LIB35-019-Q1-E1-F4
ggagnagacgggtggccgccgcgtccgtnnnnnnnnnnnnnnnnnnnnnnnnnnnnnnnnnnnnnnnnnnnnnnnnnnnnnnnnnnnncttgttgtagcagttgaagcagaaaataaacagagtaacgaatccaacatcacaaaacannacacaaactaaaaaatggctctgaatagtgtctcctctgaagaatttaccttcccatcgctagcttctcatgattcttctcaccattccggtcttgattcacctcctttgtggaaacactcaccggttacttcctttcgccggaaagattacgactttggtttggcaagattagtcattggaaaagacggtgatcatgatcagaggaagagcttctcgtacgtggagatgagaagtcgttggatcacgacaaagaanangagaaaatggntaagnttatgggaaaattcaacgaannaattgctccaagaagtcagantttgggaaattgtcatggng

SEQ ID NO: 18300 - DNA, 246 bp, Arabidopsis thaliana
  unsure at all n locations
  Clone ID: LIB35-019-Q1-E1-G10
cagncctacggaacgcacatcccggntcgacccacgcgtcngcccaancgtccgtacggctgcgagaagacgacagaaggggattctgatgttgtcataacttgtgttaggatttctctttcgttttattaagctttaattatcattctccgttgtaaagtaatcttatgaatctgtcttcgaatcaaaagttctggttgttaatggctcnnnnnnnnnnnnnnnnnnnnnnnnnnnnnngcggcc

SEQ ID NO: 18301 - DNA, 511 bp, Arabidopsis thaliana
  unsure at all n locations
  Clone ID: LIB35-019-Q1-E1-G12
gtcttgtcngcccaggccctnnnnaaaannatatcgggcctngacccacgcgtcngcccaancgtccgtacggtgcganaagacgacagaaggggcactagaaaaatggacaaaagattatggagtcttcaaggtatgactgctcttgtgaccggtgcagccagcggaatcggttatgccatagtagaagagttagctggttttggagctaaaatccacatatgtgacatatccaaaactttgctcaatcaaagtttaagcgaatgggaaaataaagggtttcaagtgagtggttcagtatgtgatgtaacctctcatcctgagagagaaaaactgatgcaaaccgtctcctcgattttcgatggcaaactcaacattcttgtaaataacgtgggggtacttcgcggaaagccaacaacagaatatgtggcagacgatttcacttttcatatatcaactaacttggaagctgcntaacactttgtcaactttcaatcctccccttaaaggg

SEQ ID NO: 18302 - DNA, 421 bp, Arabidopsis thaliana
  unsure at all n locations
  Clone ID: LIB35-019-Q1-E1-G4
aactctaaaccacactgagatggcgaaatggtggcgaggcctgagatccgtgacggcggaggtggctgatcttccggcttcttcattcggtcgatcgattcgatgtattcatcagtatcagacgatccaggcgattccacgtgaagctacgggtcgaggagtatcggctcgggatcggacgattggtcgtattcccgccgtcgttttcccgcaatcgcttctagatactgatgcttcgaagcgaggcgtgtcgaggaagcagctattgacggcggataagaagcagatcaagtctattattgactctgttggtctcccattcttctgttctaccactttccagcttcagatccgagctggtcanggttcgtcgacgcttgttgaatccggtcnagtacttccctcaagggtcatanagaca

SEQ ID NO: 18303 - DNA, 493 bp, Arabidopsis thaliana
  unsure at all n locations
  Clone ID: LIB35-019-Q1-E1-G7
ccggtntctctttcccgggcngccccacgcgtccataaagctgcgagaagacgacannagggggaggtttgtttgtgaancgtgtgaaggaaatgatttcaatggaggagaaggacacatacggcaaaagaaagactgttcctctgattccggctaactacatcagcatccttcagctccaggagcgttggctcaatgagaaagannnnnnnnnnnnnnnnnnnnnnnnnnnnnnnnnnnnnnnnnnnnnnnnnnnnnnnnnnnnnnnnnnnnnnnnnnnnnnnnnnnnagcggaggaggagaagcgtatgaatcgaagtaatcggaagcattttgggagaaaaaaggaatctatagacggcggagaagcacgattcgttgagaaggagaaaccggaagtcacggtggcgatnganagcggtggaggtgaanatgcngcggatggattaccgaananaagaagaagaanattaaggaaccttggaggaacnat

SEQ ID NO: 18304 - DNA, 500 bp, Arabidopsis thaliana
  unsure at all n locations
  Clone ID: LIB35-019-Q1-E1-H1
antcccggtccgagntatcgggtggcccacgcgtccggcaanaagacgacagaagggggagaaaggcaatggagtcggctaaatcaatcatcggtggccaccaaaatgtcatcctgatgcgtcatggtgatcgactcgacaatttcgagccactctggacttcaacagctgcgagaccgtgggatccaccgcttgctcaagacggtaaggatcgggcctttagaactggtcagagaatccggtctcaacttggggttccgattcaccgtgtcttcgtctcccctttcctccgctgcatccagaccgcttccgaagtcgttgccgccctctcagccgtcgatttcgatcccattgctatgtcatctaaagacgtgctttccatcgacaatactaaagatnaaagtgggctattgaantttggattgtccganataacgcaaccaatccttaataanaatnnaatttcccccaaagatnggnaaatttgnttccaagattta

SEQ ID NO: 18305 - DNA, 520 bp, Arabidopsis thaliana
  unsure at all n locations
  Clone ID: LIB35-019-Q1-E1-H10
gaactggtctgctcgccctggntctaccggaaccggatatcnggcccgggcccnnnnntaaatnaaaatgcgagaagacnacantaggggatctctctttgttcgctttgtggggaacgaactatggccgagagatggaggaacacggctctactcgtcatcgacatgcagaacgatttcatagaggaaggtgctgtgacgcaagtgaaaggaggaaaatctatagttcctaatgttatcagagtcgtcgaactcgcgaggcagcgtggtattctcgtaatttgggttgttcgaagaacatgatcgtcaaggaagagatgttgaattattcaggcgccataactacagttctgagaaagtcgggccagttattaaaggcaccgtnaggagcagaattggttgatggattgatgatnaacgaagaanatgactataagattgtgaaaactcgtttcaatgcnttcnttaataccaatcttcatcccttcntgcaaacttcaaggggttaccaaatttatga

SEQ ID NO: 18306 - DNA, 420 bp, Arabidopsis thaliana
  unsure at all n locations
  Clone ID: LIB35-019-Q1-E1-H2
gttttgctttctcgaaatcatgatggtttgtcctggaaatgtttggattcttcagattgtgagggaacaacttgtttgggaattataatttgcgagaattccgaaactgagatcagattctctgatatttatgctgtggagtttgttagctatggcttggtgcatagtccaaagttaggacttagacatgccaaagaatgtttccgggaacgcttgttaaatactcaagagatgtatcggttcactgtccacggatttcaaagttcaccaaaagagccttgtctttgaaaccttgctgcattcacttttggacatatggatttgcagacgtnccaaaattggtggatnaatttaattacccttgatnaaagaggtnnaaagncaanaaatcnttggaattgtcaaccaaaantggaaagg

SEQ ID NO: 18307 - DNA, 459 bp, Arabidopsis thaliana
  unsure at all n locations
  Clone ID: LIB35-019-Q1-E1-H3
cccgcgtccgccnaagagtccgcccacgcgtcngtacggctgcgagaagacgacagaanggggagtacgatagtcagccacgcgtacggttcatgtgtacttttgggaggaaggatcttgccacgtccgccgggataatcagctctgttacgtcggcggcgataatcgcatggtcgctgttcatcgtcacactactttcgcccctctccttagtaaacttgctaagctctccggtaaaagcaacataagcgtgaagtaccagctaccaaacgaagatcttgacgcgttgatttccgtatcaacggacgaagatgtagaagaacatgatggacgaatacgaccgcgtcgcacaagaatcaaaaccangcgcctctcctcctccgccttttccccttnacaaaaaacntcnccggggaaanaagttaccaatnntcaanctacaatntcaagtctctcccc

SEQ ID NO: 18308 - DNA, 415 bp, Arabidopsis thaliana
  unsure at all n locations
  Clone ID: LIB35-019-Q1-E1-H8
ccggccggcccangcgtccatgaagctgcgagagacnncngaaggggatttctgaaattaagtgaatctgaaggtgaaagcaaagccggaggaagaaataagaatcacagaggtaaaattgtgatggagctcgaagatccaacaatggcagattccacgattaagctaacagtcaaattcggaggcaaatcaataccactttcggtatcaccaagattgtacagtcaaagatcttaagtctcagttacaaccaatcancaacgttcttcctcgtgggcagaagctcatcttcaaaaggttttgggttgaaacgtcgactttgaaacaatctgatgttgggaagtggagctaaacccaaggttaatggcttctcaaggtctgcatcaagggggaaggtccaatacttaaggaanct

SEQ ID NO: 18309 - DNA, 440 bp, Arabidopsis thaliana
  unsure at all n locations
  Clone ID: LIB35-019-Q1-E1-H9
tttttttttttttggagttagaatgctatgaattccaaaccagagaanattcaaataaaacagagactaaaaaggctgttcaaacagtaataattcttgcacatgaacactaaaccagaacgatnacaggaaacaaagatacagtcagtactcagtagtttgagggcacctacggaaagcaagtaatactacagagggtagacgttccagtgcttaatgatgaaacatcatcagtacaagcaaacgtgtttttcatcatacaccgtatcactttcacaantggctgcantcattccgcancataagggagatttgacttcgagaaanaagcatcaactttgcgcaaaangancccgggctaccaagaaatgggggaactctcaatgcnacgccnttcangngacatctccttataaangngaaggcntttgcaaagcaag

SEQ ID NO: 18310 - DNA, 430 bp, Arabidopsis thaliana
  unsure at all n locations
  Clone ID: LIB35-020-Q1-E1-A1
gaaggggaggacaagaagaattcaattttcattgtcagtggaagagggagggaaagtttaagcaggtggttcactccgtgcaaaaaaattggaattgcggcagagcatggatacttcttaaagtggtcaggcagtgaagaatgggagacatgtgggcagagctctgattttgggtggatgcagatcgtggaacctgtaatgaagcagtacactgaatcgactgatggctcttccattgaaatcaaagagagcgctttggtttggcaatatcgggatgcggatccaaggctttggttctttacaagcgaaaggaaatgctagagcaatttagagaagtgttcctagcctaattgagccagtggcaagtcaaaaagccggtcactacatagtagaaagtcaagccccaagggagtgagcaaaaggattcgnt

SEQ ID NO: 18311 - DNA, 482 bp, Arabidopsis thaliana
  unsure at all n locations
  Clone ID: LIB35-019-Q1-E1-A8
ttcccgggcngccccacgcgtccataaaagctgcgagaagacgacannagggggcacccaacgacaaagggaacacgtaaaaggaactacaggataccttcgaaagccgaaggaaaccgtttgcttaaaaccattgcgtctcttctctcagatgatgatcattttaganatgcaacatctcacaagggttgtcaaatacggaggganagtgcgcacggtcaaagcgtatgttgcaacaatgtgagagctctgtttgatgagttaccgacgccacatttggtggtggagatcacaccttttccagccggaccgctcacagagaatgattaccttaaggctgagaagctggagangattcttaggtctggcgccaacatttgaaccctcttggcagtgttttactatgtgtcaaaatctanaacctgttcatactctacgatgtcttaggatgcagaatgttcaaatgtttaaacnctaggaac

SEQ ID NO: 18312 - DNA, 478 bp, Arabidopsis thaliana
  unsure at all n locations
  Clone ID: LIB35-019-Q1-E1-B2
tcgggtggccncacgcgtccgccnaangcatccgcccacgcgtcnggagaagacgacagaagggggaaattgtttcacttctgaaaaaaaaaaaaaaaaattgtttgctcatcatcttcacaaaccaaacttctcttcttctccgatctcagatttgaatttttatcgattttgagcttcgaagagctcaatctctaactgaatttcgagaaattagagagtttgaaatgggagaggaagtacaaatgagcgattacgatgtttccggcgacggagatagggtttctgaatgggagatgggattaccaagcgacgaagatctagcatctctttcttactctctgattccaccgaatttggcgatggcgtttagtatcacaccggagagaaactgtacgattcaaggatgttaatcctgcatcgggngaacaaagctctcgtcgctaanttggggggttttcaaggnccaaataactcc

SEQ ID NO: 18313 - DNA, 487 bp, Arabidopsis thaliana
  unsure at all n locations
  Clone ID: LIB35-019-Q1-E1-B3
cggtccggaatcattcgggtngccgcncgcgtccgtaaagcancgagaagacgacagnaggggtagagaatggtgacactcgtgaagcttgtagatgcatcagggagttaggtgtctcgtttttccatcacgagatcgtgaagagtggtttggttctagtgatggagtcccgaacatccgagccgctgatactaaaattgttgaaagaagctacagaagaaggtctcattagttcgagtcaaatggcgaaagggttctcccgagtagcagatagtcttgatgatctttctcttgacatcccatctgctaaaactctgtttgagtcaatagttcccaaggctataataggaggttggctcgacgaagattcgtttaaagaacgctctgatnaaaatgggggcaacgaaaatctaaagnggttnaanaanggtncanagaccataantcaaagaatattcccttctgatgatatcccnagctaatccgc

SEQ ID NO: 18314 - DNA, 424 bp, Arabidopsis thaliana
  unsure at all n locations
  Clone ID: LIB35-019-Q1-E1-A7
gaaacagagtttccctgagctacatttaacgaaagaagattgtatggtcaagaaatggatcgaatctagtgttttctgggcgaattatccagaaaaagcaccgatagagttacttcttaaaagagtatcaaccaacgaatactactggaaacgtacttcagattttgttcaagcaccaatctcaaaacagggtcttgcaaagatttttcaagcaatgattgatcattcgccacttccacgacgagtttggatgcaatggaatccatggggagggaaaatggctgagatagcgtctgatgcgacggcgtttgtgcatagaggtggtaatgttttcatgattgagcatttcatgaattggtatagacctggagatgagcttgaagagaantcctggngaatgcaanaaattttaaagaaactatgg

SEQ ID NO: 18315 - DNA, 528 bp, Arabidopsis thaliana
  unsure at all n locations
  Clone ID: LIB35-019-Q1-E1-C4
ntggnagtgtcctctagganggtccgggtccggnggnnacgggtggnccggccgcgtccgtaaaagcancgagaagacgacagaagggggatttgagaaaaagaagagatgacgacgatacgtagattcaagctgcaatgaccttctccgattcacttccgtgaatctggaccacctcactgnaacattcaatatgtccttctacatgacctatttagcgagatggcctgactattttcatgttgctgaaggtcccggcaatcgtgtcatgggttatattatgggtaaagttgaaggacagggtgaatcttggcatggtcatgtgacagccgtcactgtctctccagaataccgcaggcagcaacttgcaaagaaactgatgaaccttctggaagatataagtgataagattgataaaagcctactttgtgggatcttttgtaagaacnttcaacacaccaaccatcaagattntgaaaaagccttgggtacatnatttaaaaggcnggnttttacgccaattaatca

SEQ ID NO: 18316 - DNA, 476 bp, Arabidopsis thaliana
  unsure at all n locations
  Clone ID: LIB35-019-Q1-E1-D10
cgccaggtctaccggnacggngntccggntngacccacgcgtcngtacaactgcgagaagacgacagnagggggcgtcgtcttcaacgatgctctcaacggtgacggcgacggcggtttctcgaccgattctgaaggtggaatgtacaatcaaaaggacgtttaaagtgacggcggagaagtttccgacgtttctgccgaccgatgtcgagaaaattaaagacacgtttgctctaaagctcgccgccagaatagagaggcttcctgtatctgtgagcttcagggaagatagtattatgagcagttgcgtgacaccgctgatgcggaacgagacaactcctgttgtgctttttcacggatttgatagttcttgtttagagtggagatacacttatccgttgcttgaagaaaccggtttaaaaacatgggcatttgatatccttggttggggtttttctgatttanacaaactttcac

SEQ ID NO: 18317 - DNA, 409 bp, Arabidopsis thaliana
  unsure at all n locations
  Clone ID: LIB35-019-Q1-E1-D11
tttgtgttcttcttcctcctcagattctctttcactaaacagaaacaaagatggttttgacaaaaaccgcaacgaatgatgaatctgtctgcaccatgttcggatctcgctatgttcgcactacacttcccaagtatgagattggtgagaactcgataccgaaagacgctgcgtatcagatcataaaagatgagctgatgcttgatggtaacctaaggcttaacctagcttcttttgtgactacatggatggaaccagagtgtgacaaactcatcatggactctatcaataagaactacgttgatatggatgagtaacctgtcacaactganctccaaaaacnatgtgttaaaattntaacncnaangttnaangngccnaaccaaggaaccctnaaaggggttggaat

SEQ ID NO: 18318 - DNA, 478 bp, Arabidopsis thaliana
  unsure at all n locations
  Clone ID: LIB35-019-Q1-E1-D3
tccgagcanacgggtggccgcccgcgtccgtaaagaagcgagaagacgacagnaggggggttcagagaagatcgtttactctttcctcaatttcgaacaaagttttcgaattttccaactctctctagtgaatttagggttctgatttcgacattagtgtaaagatttgttttttatccgaggggtgcgattgtgtagtcaaaccangatnaaatgtcggcatcaacggtgtcgatcaccgctaatacggcggcagcgactagacggacgccgattcttgccggagagaaaaaatcaaactttganttaccctcaaagcgaatcgcttgcgaacggtggtgttggggaaaccggtggtacgagtagaagatntgaagccgcggtgaaacctacccttgattcatttcangggacaagaatttgggtcccggtgacaanaaaggcctgtttccgctgcgacgggggactaattncaacc

SEQ ID NO: 18319 - DNA, 431 bp, Arabidopsis thaliana
  unsure at all n locations
  Clone ID: LIB35-019-Q1-E1-D4
agggaaagataatcgtttgtctgtgcagagagagagagagaaaatgaggttgttcgatccatggccagtgttcttcaagagagaatggaaacgttgctggccattcctcaccggtttcgccgtcaccggcgttctcatcaccaagctaaccgccggactcactgaggaagatgctaagaactccaagttcgtccagcaacacagaaggtgattcactgaagcaaaatgtagaagctgacaaggcatatagatttgggactatagtgaatgcttcagctttgaaacatgttcaataacaaagaagatcattctatatactcttttattttctctgagtttcgaaatcagcttttccttttctgaaacttaacaatggnatggttttgttcacagtatcctaatcccanttgttgggaatgggttttanggcc

SEQ ID NO: 18320 - DNA, 424 bp, Arabidopsis thaliana
  Clone ID: LIB35-019-Q1-E1-D7
tgagaaaaaacacagagaaagagagagaaacaatggaaacggaaggaagaagacgagaagtggttgtttcatctctccaattcgcttgctccgacgatatctccaccaatgtcgccgccgctgagcgattagtcagagaagctcacgctaaaggagctaatatcattcttattcaggaattttttgaaggatattacttctgtcaagcacaaagagaagacttctttaagcgagccaagccttacaagaaccgtcctaccattgcaaggatgcagaagctggcaaaggaattgggtgtagtgatacctgttagtttctttgaggaggcaaatactgcacattacaattcgattgctataattgatgctgatggaactgacttgggaatttataggaagtccatattcctgatggacctggttat

SEQ ID NO: 18321 - DNA, 403 bp, Arabidopsis thaliana
  unsure at all n locations
  Clone ID: LIB35-019-Q1-E1-D9
tctcactttgttcatctaaaaactcctcctttcatttccaaacaaaaacttctttttattctcacatcttaaagatctctctcatggcgatgtctttctcaggagctgttctcactggtatggcttcttctttccacagcggagccaagcagagcagcttcggcgctgtcagagtcggccagaaaactcagttcgtcgtcgtttctcaacgcaagaagtcgttgatctacgccgctaaaggtgacggcaacatcctcgatgacctcaacgaggccacaaagaaagcttcagatttcgtgacggataaaacaaaagaggcattancagatggtgagaaagcgaaagactacgttgttnaaaaaaacantnaaaccgcanatacattgggtaaagaaactgngaa

SEQ ID NO: 18322 - DNA, 488 bp, Arabidopsis thaliana
  unsure at all n locations
  Clone ID: LIB35-019-Q1-E1-E10
nacggtccggtcttccgggtcgncccacgcgtccgcccaaacgtccgtacggctgcgatgaacgacagaagggggtggtattcaacaaatttgtctcgaatttatagagctcgaagcttcaaggaagttataatggctagtgaagatgaatcgattgaacaaaaagctgctgctcgtaaagaggcacttaaagctctaagggcagctcaggaactgtctgagaccaaggaagacggagaggatgaagctgtcgaagaagatggtccagccatgaagtttagaaactatgttccccaagctaaggagcttcaggatggtaaactagcgccaccaaaagctacccaaattcnaagattcgatngttgcacttncaactgccgtntaaaaaaaaganggnccctttttttacatcgctcccaanaaacccaantgggaaccccnananattttcnaaaaaaacttntnaacccccaaagggggntccaaaa

SEQ ID NO: 18323 - DNA, 428 bp, Arabidopsis thaliana
  unsure at all n locations
  Clone ID: LIB35-019-Q1-E1-E12
anaanacgacagaagggtacngctgcgagaagacgacanaanggtacggctgcgagaagacgacagaagggtacggctgcgagaagacgacagaaggatacggctgcgagaagacgacagaagggtacggctgcgagaagacgacagaagggtacggctgcgagaagacgacagaagggtacggctgcgagaagacgacagaaggatacggctgcgagaagacgacagaanggtacggctgcgagaagacnacagaanggtacggctgcnagaagacnacagaanggtacggctgcganaagacgacagaaggggtacagagtcaattnaagaaaccganagagagantnagcggaatcatgacttctccgggaaaatctccgagattcgaccggaaatcanccacggttgtcaccgtcaaccgtctt

SEQ ID NO: 18324 - DNA, 461 bp, Arabidopsis thaliana
  unsure at all n locations
  Clone ID: LIB35-019-Q1-E1-E4
ctnccaggtgggtcgtgtccgcaggantcgggtggccngccgcgtccgcgaaaaaaacgacagaaggggatggttttgtgacttgtgtgcgagtttgtagaagctttactgatatagaaatgccgttgccgatgcagtctctcttcctctgtttctgattcctgaatanatttgttaaacgatggagaagatcgttcgttcttcttcgctgattctacttgttggcctccttctttttatgaattttcacggatttgtccggatcgccgaagcaacgaagcgacggatcgagatctccgatgacctanacgacgttgaagacaatgaagaagacgagtcatggaaagagtgggggaagaaagcaacgaccccggaatttgnttcgcctccggatttcaccaatntgggatcgattagntcangnggaaatgggntaaacggtttttggaacgtcncggttc

SEQ ID NO: 18325 - DNA, 553 bp, Arabidopsis thaliana
  unsure at all n locations
  Clone ID: LIB35-017-Q1-E1-D12
aantggtttgctttggccctggcccgtccgggaaaatccaaagggtcgncccacgccgtccgaagaagacgacaagaagggggccaaggccctccgatggaagttaggaggggcnnnggcggggtccgctggcaaaaacctaagggcgcngagcccgggcnggagcgggccgtcngggtgcaagattcttggtggtaagtnagcaaatattcanatattcaaaactctcaagacatactcaggtgatgattctgtgatagtaggggaatggagattttctgcccatcactcatattgggtactatccctctgaacatttctcaaggacaaacgaacacaacaactcctcacacaaggaaacaagcataaaggtctctacgtgttgaaggatgtcccgtttcaaacttattactctaccaggcaacaatctagtgatgatgaagtgtggcatcagagattgggtcaccctaataaagaagttctacaacaccttatcaaaactaaagctattgtagtcaataaaacaagctccaatatgtgtgaggcttgtcaa

SEQ ID NO: 18326 - DNA, 525 bp, Arabidopsis thaliana
  unsure at all n locations
  Clone ID: LIB35-017-Q1-E1-D3
atggtctctcncccagccccggaaatccgaatcgacccacgccccgtacggntgcgaaaagacgacagaagggtacggctgcgagaagacgacagaagggtacngctgcganaagacgacagaagggtacggctgcgagaagcgacanaanggtacggctgcgagaagacgacagaagggtacggctgcgagaagacgacagaagggtacggctgcgagaagacgacagaagggtacggctgcgagaagacgacagaagggtacggctgcgagaagacnacagaagggtacggctgcgagaagacgacagaagggtacggctgcgagaagacgacagaaggatacggctgcgagaagacgacagaagggtacggctgccaagaagacnacagaagggtacggctgcnagaagacgacagaagggtacggctgcgagaagacnacagaagggggtccctaatgaactggttaagctgatagagatactaaaccctcaanacaanccctggaaggattacggttata

SEQ ID NO: 18327 - DNA, 495 bp, Arabidopsis thaliana
  unsure at all n locations
  Clone ID: LIB35-017-Q1-E1-D9
tagccgtccgggacatccaaggtcgacccacgcgtccgcccacncgtccgtacggctgcgagaagacgacagaagggggaactcctttcatacgttttctctctactctcatcgcttttcttatctctctcggagctcttccgtcgtccaccattgattacgggagtgtattgagctaaatatggctataatacaacttggaagtacatgtgttgctcaatggagtattcgtcctcaatttgcagtcagagcttattatcccagcagaatcgaatcaactcaccatcaaaattccagtagccaagtaaattgtttgggagcttcaaagtcgagtatgttctcacatgggtcattgcccttcttgtccatgacgggaatgtccaagaaatatgcatcctcctcgcagaggatctcgcttcactgttagagctgatgcagattactattcggtactcggagtttcgaaaaatgcaaccaaagctgagattaaaagcg

SEQ ID NO: 18328 - DNA, 529 bp, Arabidopsis thaliana
  unsure at all n locations
  Clone ID: LIB35-017-Q1-E1-D1
aactggttttggtcccctgggntctaccgnannccnanatcgagcccacggnccccgacatnaacgggaaaggnancnnaaagtgagcgtgttgatgcataacgaacgatgccattttccgcatcaatctcatcgccttcttcttctgtcgcgcttcttcgatcgcctctctctttcttcatcttcactcccaaaaccctaatcttcaccagaaccaggatctctggtttcccttatcttgcttcccggcgatcccgcgatttcatcaacgggagggatgatttcgctgacgatacgaggagctggaaccggaagatcaaaccggagtatgggttcnnnnnnnnnnnnnnnnnnnnnnnnnnnnnnnnnnnnnnnnnnnnnnnnnnnnnnnnnnnnnnnnctgttacttagatttgtagaaaatgttttcaaganagatttctaagaagagcaaggaaagctgtccgatnaattttgcctgtttcgatctcctacgaaactcgtggggtttcagtgaatgggagttcnt

SEQ ID NO: 18329 - DNA, 533 bp, Arabidopsis thaliana
  unsure at all n locations
  Clone ID: LIB35-017-Q1-E1-E2
aactggtttccgttcccacgccccggaaatcccgaatcgacccacgcgnccgtacggatgcgaaaagacgacggaagggtacggctgcgagaagacgacanaagggtacggctgcgagaagacgacagaagggtacggctgcgagaagacgacagaagggtacggctgcgagaagacgacagaagggggaagccagaggtttcagatatagtaatcttcaaggctcctccaattttgctggaatatccggaatatggctacagttccaatgatgtattcataaaaaggatantggcaagtgaaggtgactgggttgaanttcgtgatgggaagctctttgtgaatgacattgtgcaagaagaagattttgtcttagaaccaatgtcatgtgaaatggnaccaatgtttgtcccaaaaggttatgtccttgtccctggtgataaccgcancaaaagccttgactcccataactggggtccacttcaatagaanacatcttggnaanatcgggntccgtactggcaacgagcaag

SEQ ID NO: 18330 - DNA, 441 bp, Arabidopsis thaliana
  unsure at all n locations
  Clone ID: LIB35-017-Q1-E1-E5
ccctgagatagagataagagaatttcgagagattcgagagaagagacgatgggtttccaagatctcgaagctggtactcgatctccggcgccgaatcgttttaccggtgggagacaacagagactttcgtctcgtggggatccatctcaggaggtcgccgccgggattttcaggatcagcacggctgtcaattccttcttccgcctcgttaattcgatcggaacacctaaagatactcttgaattacgagataagctgcaaaagacaaggttacagatatccgaattggtgaagaatacttcagctaaacttaaggaagctagcgaagccgaccttcatggatcagctagtcaaattaagangatagctgatgctaaactggcaaaaagattccaatcagttctcaangagtttcagaaaagctcaanagacttgcagctg

SEQ ID NO: 18331 - DNA, 416 bp, Arabidopsis thaliana
  unsure at all n locations
  Clone ID: LIB35-017-Q1-E1-E7
ctgcgagaagacgacagaagggtacggctgcgagaagacgacagaagggtacggctgcgagaagacgacagaagggtacggctgcgagaagacgacagaagggtacggctgcgagaagacgacagaagggtacggctgcgagaagacgacagaagggtacggctgcgagaagacgacagaaggggtcggttggaaggggaaaagatcaatttctctctcttctctctcttcaattattcagagagagaaacacgatctttgtttctccatccggtttgtttactaagttttgtctctggtatggttcaactttgtctccggcgaagtccggctttgtttcggctatctgttgccgctttttgttttttccgttgaataaattatgcgatctatgttagtgttgtgggtttangtga

SEQ ID NO: 18332 - DNA, 460 bp, Arabidopsis thaliana
  unsure at all n locations
  Clone ID: LIB35-017-Q1-E1-E9
gantgttcctctttgcactagccgtccggacntccaaaggtcgacccacgcntccgtacggatgcgagaagacgacagaaggatacggctgcgagaagacgacagaaggatacggctgcggaagacgacagaaggatacggctgcgagaagacgacagaagggtacggctgcgcgaagacgacagaagggtacggctgcgagaagacgacagaagggtacggctgcgagaagacgacagaaggatacggctgcgagaagacgacagaaggatacggctgcgagaagacgacagaagaatacggctgcgagaagacgacagaaggatacggctgcgagaagacgacagaaggatacggctgcgagaagacgacagaaggatacggctgcgagaagacgacagaaggatacggctgcgagaagacgacagaagggtacggctgcgagaagacgacagaaggg

SEQ ID NO: 18333 - DNA, 510 bp, Arabidopsis thaliana
  unsure at all n locations
  Clone ID: LIB35-017-Q1-E1-F3
ngccccggaaacccgaatcgacccacgcgtccgcccacacgtccgcccacgcgtccgtacggctgcgagaagacgacagaaggggggattaccttggaacttgatatgcaatgggatggaaacccaaatatagtacttggcgtcaagaccttagttggtgtatccctccccattcaggtgaaaaacatcggattcactggtgttttcaggctaatttttaggccactagttgaggactttctctgctttggagctgtcagcgtttctcttagagaaaagaaaaaattggacttcacccttagggttgttggaggtgatatttcagcaattcctggactttctgaagctattgaggaaacaattcgggatgccgtggaagattctatcacatggcctgttcggaaggtcatcccaattatacctggtgattatagcgatctggagctaaagcctgttggaatgttagaagtgaaacctgtgcaagcaaaagaacttgaccaacaaaagatn

SEQ ID NO: 18334 - DNA, 504 bp, Arabidopsis thaliana
  unsure at all n locations
  Clone ID: LIB35-017-Q1-E1-G1
cggaaatccganatcgagccacgggcccgtacggatgcgaaaagacgacagaaggggcaacncaaaaagtaacaatttgaattacttccgcaaatctaaaataatatctagtgaancgaatatgtgtttctttgataatcggtgcgatcagaatctgacggtggtggtggatgtggcgtggtggatggaggctgttcctcnacaaatcanttctccggcgaagccatcggtttctccgantcttgagacgattttanaaggcggatagaccgaagaagacaatcaagaacaagaaaacgatgacgtgtaaattgtaatgatcattttgttactcggtcttgggtttaagatanactcatgttgttgttgttgttttttccataactgtataanatgagattttgtattggaatcttttgtacantcaaatctcagttcattgtganatttcaatcancnttcacatccgtggtacgctcggtgatctgttgttaaaanctcacg

SEQ ID NO: 18335 - DNA, 514 bp, Arabidopsis thaliana
  unsure at all n locations
  Clone ID: LIB35-017-Q1-E1-G3
cgcccccggnaaatcccgaatcgggccacgcgnccgcccacacgtccgtacggctgcgagacgacagaagggggaaagaaaaaannaanaaaaaaaaaagacttctcctcaaaaatggcgtttacactaggtggaagagctcgtcgtctagtctctgcaacatcagttcatcaaaatggttgcttacacaaactgcaacaaattggatcggatcggtttcagcttggtgaagcaaaagcaataagattactacccaggagaacaaacatggttcaagaattaggaatcagggaagaatttatggatctaaacagagaaacagagacaagttatgattttctggatgaaatgagacacagatttctgaaattcaagagacaaaagtatctaccggagatagaaaagtttaaagctttggncatagctcaatcaccaanaggtaatggtgataggatgtncagattcaagggtatgtccatcttaggtccangattcaacctggtgaaacttttac

SEQ ID NO: 18336 - DNA, 502 bp, Arabidopsis thaliana
  unsure at all n locations
  Clone ID: LIB35-017-Q1-E1-G9
gtccgccttgntctagccgtccggacatccagggtcgacccacgcgtccgcccacacgtccgcccacgcgtccgtacggctgcgagaagacgacagaagggatcaaagatctttttttttctcaattattgtgataatgaattcgatgtttagtgccttcgacgccatgtgtgcagagattatgggannnnnnnnnnnnnnnnnnnnnnnnnnnnnnnnnnnnnnnnnnnnnnnnnnnnnnnnnnnnnnnnnnnnnnnnnnnnnnnnnnnnnnnnnnnnnnnnnnnnnnnnnnnnnnnnnnnnnnnnnnnnnnnnnnnnnnnnnnnnnnnnnnnnnnnttgctcttgagctcgatggtcttcattgcttcgaagactataagttcgttccttgatcaatatcaaagattaccaaatttttggctgagtttttttttccttttcctggtttgntcctggttccaatccctttaatggtaatacaattttgggaagaattaant

SEQ ID NO: 18337 - DNA, 510 bp, Arabidopsis thaliana
  unsure at all n locations
  Clone ID: LIB35-017-Q1-E1-H10
ctaggccctccggaaaatccaaggtcgacccacgcgtccgacggntgcgaagaagacgacagaagggaagtcgataaagaaaaggacactacaaggcaagattcatgatcaaactgggagggagaagaaaaacaanaaagacgcgtgaacatcaaaatcaccgtctccatcattctgataatcctgctgatgatgacggtgggcaatcatcagaaggataaaaatggaaacaaaggcagagttgtaggacaaggaagacgacagaatcatcaaggcggcaacggcattggacatggaacagcttcatcatcttctcatcctaattatcatcctgttgaggtctcaaagcgtccacctggcccgagaatgcctgatgggacgagagggttcacaatggggcgtggtaaagcgattcctcctcccacatctactcaaaccagtcatgaagtttgatcgttccgcatcntcgttgtatcattgtgtgggtttaattcacattaaaaaatgtga

SEQ ID NO: 18338 - DNA, 433 bp, Arabidopsis thaliana
  unsure at all n locations
  Clone ID: LIB35-017-Q1-E1-A7
agagcgataaagagatgggtggagaagagagatcaggagatggagaaaaaagaggggaagaagtagttgatgctggttctctcttcgtccttaaatccaaagggacatggtggcactgcggattccacttgacgacgtctatagtggcgcctgcgctactgagtctaccgtacgccttcaagttcttaggatgggctgccgggatatcttgtctggtcggaggagcagccgttactttctactcgtacactcttctttctcttactctcgaacaccacgcttctctcggcaaccgttacctccgcttccgtgacatggctcatcacatcctcagtaattctttttccttttacatttgcnctttcctatanncaaagccngcgacaaatttaccttaagagaanttcaatcangattgagatgtgangttgtc

SEQ ID NO: 18339 - DNA, 431 bp, Arabidopsis thaliana
  unsure at all n locations
  Clone ID: LIB35-017-Q1-E1-A9
ggctgcgagaagacgacagaagggcatgacgataagcacgatggtgtttatggatacccgcagcaggctggatatccagctggaaccggtggttatccgccacctggtgcatacccacaacagggaggttaccctggatatccgcctcagcaacagggtggatacccgggttatccgccacagggtccatatggttacccgcaacaaggttatccaccacagggtccatacggttacccgcaacagcaagctcatggtaaaccgcagaaaccgaagaagcatggtaaggntgganctggaatgggactaaggacttgggcttggagctggtttaatgggtgggttgttgggttggtgaaaccgtttctgacatcgctgatatgggtgacattggtgacatgggttacatgggtgggttccaattcngaatg

SEQ ID NO: 18340 - DNA, 507 bp, Arabidopsis thaliana
  unsure at all n locations
  Clone ID: LIB35-017-Q1-E1-B1
cgttcctggcctacgaatccgaatcggccacgcgnccgccacactcanccacgcgtccgcccacgcgtccgtacgctgcgaagacgacagaaggggcctgaggaaagaaaaggagctccaaagggctgaacgcgagagacggaaacagcaagaagcccangagcgagaagctcaggctgcactcaatgacggagaagtgattagcatccactcaacaagcgagctagaagcaaagacaaangctgctaagaaggcatcacgtctgctcatcctttacttcacagccacatggtgtgggccatgccgatatatgtctcctctgtactcaaacctggccacacagcactcgagagtcgttttcttgaaagttgatatagacaaggccaatgacgtggctgcttctggaacattagcagcgtcccgaccttttgcttcatcaagagatggcaaagaggtggacaaaagttgtcggagctgataaanggtcgcttgancagaagattgcac

SEQ ID NO: 18341 - DNA, 541 bp, Arabidopsis thaliana
  unsure at all n locations
  Clone ID: LIB35-017-Q1-E1-A2
aactggtttcctgtgcccaacgcccccggaaatcccgantcgacccacgcgtccgtacggctgcgagaagatgcgagaagacgacagaagggggagaaagataaaaacagaaaaagataaggaacttgcanagaaagcaaaaaagaaagaagaagcgaagaagagaaactaagattcagatggcttcccagacaaatcaaaccgtggtggataccaagaaaatcgaaaccgagaacccgccaaaaccgcaagtgcctgcatcatcatgcaggaagagggtgaaggatgataacgccactttctttgcaaacctcaaggatcacatggatgaattcatacatgcctcaatggatgaacacaagacttgtttcaaaaacaccatggacaaagatattccgggagcttctccaaggcggaggcagttgcagagaagcaaanttgaggctaagggaattggtcnaagattcactctcctcntcagacagcanttgactaagttagagatttttcacaaccttgtgagctcangaaattaatcatg

SEQ ID NO: 18342 - DNA, 373 bp, Arabidopsis thaliana
  Clone ID: LIB35-017-Q1-E1-B12
tgtatcagcttttgacaaggatttaacacttgatgttcttgatcatccggttctgaacttaatctactatatggtgggtagaagtacttccatcggcactagtcctcttcattctccgaaagctacctccaaagagagtatcagctcaataccatccgatccagtagaaacctttgtcactgaaccatctcacacggtgagtatgatgctgtttaagagaagagtaaagattaaaaaaaaaaattggggcaaaaaatgaaaggtgaagaagaaatcggtgtggaatctgcgtgagtttttggaatgcacgttcatataaacgattttacagcttttagttgttgtaacccgccgtgacttttgggttggtaat

SEQ ID NO: 18343 - DNA, 537 bp, Arabidopsis thaliana
  unsure at all n locations
  Clone ID: LIB35-017-Q1-E1-B2
atggtttccgtncccacgccccggaaaatcccgaatcgncccacgcgtccgtacggatgcganaagacgacagaaggggatccgccggaaaaaaataacgtctttttttttttcttccaatctctctgtctctctccccaattcccagattctcatttttgcagagattttaggaggaacatgattgtttgaattgggagagacattggttcgtgtaaaatgcgggtgcttggtttgagctcaagcttatgctctggtgaggataaggaagaagaagagattaatggagaaggctctctcacgcctgtttatctcaacgtctatgatctaactcctgtcaacaattatctctattggttcggccttggcatatttcactctggcattgaggctcatggtttcgaatatgggatatgggagctcatgagtattccaagcaattggggtantttgaggttgaacctaagaactgtccaggtttcaaccttaaaggcgcncaattttgtttgggaaaccaccaancatgtcccgcccctg

SEQ ID NO: 18344 - DNA, 443 bp, Arabidopsis thaliana
  unsure at all n locations
  Clone ID: LIB35-017-Q1-E1-B5
aagagacagaagggtacggctgcgagaagacgacagaagggtacggctgcgagaagacgacagaagggggactcggtgttgtcctcttggagttggctacagggctaaaagctgtaggaggtgaaggttttaaagggagtttggtggattgggtgaaacagcttgaaagctcaggtagaatcgctgagacattcgatgaaaacattcgagggaaaggacatgacgaagagatctcgaaatttgttgagattgctcttaactgtgtgagttcaagacctaaagagagatggtcaatgtttcaggcataccagtcactgaaagctattgctgagaaacaaggctattcgttctccgaacaagacgacgacttccctttgattttcgacacgcangagaacgagaaagtgtgaaaatgaaccntttatgatacgaggaggaattag

SEQ ID NO: 18345 - DNA, 447 bp, Arabidopsis thaliana
  unsure at all n locations
  Clone ID: LIB35-017-Q1-E1-B7
aagacacagaaggggaaccaaaaaaataaaagatttttacattcgacgagaccgtgatcgaaacggcgatggttgaccagagtcctcgccgtattgtcgtggcggcgctcctattgtttgtggttctgtgcgatctttcgaattctgcgggagctgcgaattctgtgtcagctttcgttcagaacgccatcttgtccaacaagattgtcatcttctccaaatcctactgcccgtattgtttgcggtcgaaacgtatattcaaccaacttaaggaagagccatttgttgtggagcttgatcaagagagaggacgggngatnaaatcccagtatgaagcttttaaaaatccttgggtcgtccgtactgtccccgcaagnttttggttaacggnaaagcatatttggtgggntnaagatgattcntgggggcctgcctttggggaantgg

SEQ ID NO: 18346 - DNA, 523 bp, Arabidopsis thaliana
  unsure at all n locations
  Clone ID: LIB35-017-Q1-E1-C1
anggttcctttcctcgcctcggaaatccaaantcgacccacgcctccgtacggatgcnagaagacgacagaaggggggggtcgcagtgacaaggcccgggcgactgtttaccaaaaacacaggtctccgcaaagtcgtaagaccatgtatgggggctgacgcctgcccagtgccggaaggttaaggaagttggtgacctgatgacaggggagccggcgaccgaagccccggtgaacggcggccgtaactataacggtcctaaggtagcgaaattccttgtcgggtaagttccgacccgcacgaaaggcgtaacgatctgggcactgtctcggagagaggctcggtgaaatagacatgtctgtgaagatgcggactacctgcacctggacagaaagaccctatgaagcttcactgttccctgggattggctttgggcttttcctgcgcaacttangtggaangcgaaagaaggcccccttccggggggggcccgagccatcaattgagataccactctggaaga

SEQ ID NO: 18347 - DNA, 415 bp, Arabidopsis thaliana
  unsure at all n locations
  Clone ID: LIB35-017-Q1-E1-C11
ggtttgncctagcctccgganatccaaggtcgacccacgcgtccgcccacancgtccgtacggctgcgagaagacgacagaagggtacggctgcgagaagacgacagaagggtacggctgcgagaagacgacagaagggtattgccnnnnnnnnnnnnnnnnnnnnnnnnnnnnnngcggccgctctaanggatccaagcttacgtacgcgtgcatgcnacgtcatagctcttctanantgtcacctaaattcaattcactggccgtcgttttacaacgtcntgactgggaaaaccctggcgttacccaacttaatcgccttgcagcacatccccctttcgccagctggcgtaatancgangaggcccgcatcgatngcccttcccancagttgcgcagcctgaatggcgaatgg

SEQ ID NO: 18348 - DNA, 454 bp, Arabidopsis thaliana
  unsure at all n locations
  Clone ID: LIB35-017-Q1-E1-C3
gcgagaagacgacagaaggggaattgttcactgcgacgttgaatctaagaacgttcttgtttttaacggtggtagctccgttaagctagcggattttggatcggcggttgagtttgagaaatctacgattcatgtttcgccacgtggaagtccgctttggatggctccggaggtggttagaagagagtaccaaggaccggagagtgacgtgtggtctttagggtgtaccgtcatcgagatgctcaccgggaaaaccagcttgggaagatcacggtttcgactcgctgagtcgggatcgggttctctaacgatttgctttttantccggtggggttatcggaactcgggagaaganttccttanangaaatgcttgaaacgtgatcggagtcagcgttgggagctgtgatcagctcctgcaacaatccgtttcctgtgtcaagatcatcatgact

SEQ ID NO: 18349 - DNA, 512 bp, Arabidopsis thaliana
  unsure at all n locations
  Clone ID: LIB35-017-Q1-E1-C4
ctcnccagcccccggaaatccgaaatcgacccacgcgtccgcccacacgtccgtacggctgcgagaagacgacagaaggggagttccctccgttgcttggaatcaacactggacatggaaaacacagatactcagacaaaggtctagcagctgttttcgagtctcacttgaaggagctaaatgctcctttccatgaagccccagataaggttggctggtttttgactaccagtgttgcggcaaaggcatggttggagtctagacgctcagctggaggagtttctgcgtagctcttgtaattggtatgtagctttgatattgtctatgtggcttcgagctttctccactatttagttttctttctcctgataccggatactgggatnaggaaagattttgtaatgctaacaaactccggttatacacattttgaaacaattttagagaactgattaagttcaaaaaaannnatnannncnnnaaaaaaaaaagcggccgcccanaagatcaag

SEQ ID NO: 18350 - DNA, 523 bp, Arabidopsis thaliana
  unsure at all n locations
  Clone ID: LIB35-017-Q1-E1-C8
gtttgtctcctgggtcaccggaccggacacccgggtcgaccacgcgtccgtacggatgcgagaagacgacagaagggtacggctgcgagaagacgacagaagggtacggctgcgagaagacgacagaagggtacggctgcgagaagacgacagaagggtacggctgcgagaagacgacagaagggtactgctgccagaagacgacagaaggggactccaacagagaagcaaaaaatcnanancannnntaaaaaaaaagcggccgctctagaggatccaagcttacgtacgcgtgcatgcgacgtcatagctcttctatagtgtcacctaaattcaattcactggccgtcgttttacaacgtcgtgactgggaaaaccctggcgttacccaacttaatcgccttgcagcacatccccctttcgccagctggcgttatancgaacaggccgcancgattgcccttccaacagttgccaacctgaatggcaattggacccccctgtaccgngcattaagcgcggg

SEQ ID NO: 18351 - DNA, 511 bp, Arabidopsis thaliana
  unsure at all n locations
  Clone ID: LIB35-017-Q1-E1-C9
actggttttggtctgccctagcnctccggaaatccaaggtcgacccacgcgtccggagaagacgacagaagggtacggctgcgagaagacgacagaagggtacggctgcgagaagacgacagaagggtacggctgcgagaagacgacagaagggtacggctgcgagaagacgacagaagggggaactctaaaccacactgagatggcgaaatggtggcgaggcctgagatccgtgacggcggaggtggctgatcttccggcttcttcattcggtcgatcgattcgatgtattcatcagtatcagacgatccaggcgattccacgtgaagctacgggtcgaggagtatcggctcgggatcggacgattggtcgtattcccgccgtcgttttcccgcaatcgcttctagatactgatgcttcnaagcgaagcgtgtcnaggaagcaactattgacggcggataagaagcagatnaagtctattattgactctgttggtctcccaatcctctgt

SEQ ID NO: 18352 - DNA, 469 bp, Arabidopsis thaliana
  unsure at all n locations
  Clone ID: LIB35-016-Q1-E1-E12
ccgacattcccnggtcgacccacgcgtccgtacagctgcgagaagacgacagaagggggtacgtcttttgcataagaagaaacagagagcattatcaattattaacaattacacannnnnnnnnnnnnnnnnnnnnnnnnnnnnnnnnnnnnnnnnnnnnnnnnnnnngctttggccacgacggcaccgttagctccggtcaccagtcagcgaaaagtacggaacgatttggaggaaacattaccaaaaccatacatggcaagagcattagcagctccagatacagagcatccgaatggaacagaaggtcacgatagcaaaggaatgagtgttatgcaacaacatgttgctttcttcgaccaaaacgacgatggaatcgtctatccttgggagactataagggatttcgtgaccttggttcaaccaatttcctctatctttggaccttaccataaacttagcgttcact

SEQ ID NO: 18353 - DNA, 492 bp, Arabidopsis thaliana
  unsure at all n locations
  Clone ID: LIB35-016-Q1-E1-E5
gtttctgtctcccctggtatntancaatccgacattcgcnggtngccccacgcgtccgtaanagctgcgagaagacgacagaagggtgttcgacgaagaagaagctaatggccctgacatctggaacacgacatggtatccaaaagcttcagaccatgtgaacacggacaagccctggtttgtggttgatgcaactgacaaaattcttggtagattggcatcgacaattgctaatcacatccgtgggaagaatcttgcctcttacactcctagtgtcgacatgggagcttttgtgattgtggtgaatgctgagaaagttgctgtatctggaaagaagcgtaaccaaaagctgtacaggaggcattcaggacgacctggtggtatgacagtagagacatttgattaattgcagcagagaattcctgaangaatcgttgagcatgctgtttcgtggaatgcttccanagggacggcttgggaaaactctgttca

SEQ ID NO: 18354 - DNA, 490 bp, Arabidopsis thaliana
  unsure at all n locations
  Clone ID: LIB35-016-Q1-E1-F1
actgtttnctccccgtggctctccgganattcacaggtcgncccangcgtccgtanagctgngagaagacgacagaagggggagccgcacgtgtgctnnnnnnnnnnnnnnnnnnnnnnnnnnnnnnnnnnnnnnnnnnnnnnnnnnnnnnnnnnnnnnnnnnnnnnnnnnnnnnacataccacaaaacctctcttctctctctattgattctctacgaagaggaaagtgattttgaaccatcttgatcggaaacggcgtttcgaaactggaggtcgaagacgaaaaaaactcttatctcatcgctccggtgtaccgaattcgagaggtttttgttaggtttcgtagtgattgattgattttgatggaagatagtgtggtggatgatgttataaagaggttactaggagcgaaaaacgggaagacgacnaancaggttcagttgacggangctganattaaacaatctttgttctaccgctaancaagat

SEQ ID NO: 18355 - DNA, 459 bp, Arabidopsis thaliana
  unsure at all n locations
  Clone ID: LIB35-016-Q1-E1-F12
ctagcctccgnccatccaaggtggccccacgcgtccgccnacgcgtccgtacggctgcgagaagacgacagaaggggcaatccaaacctgggtccgaacctatgttgaacgctactatccaaacccgaaccttatcaaaacagactctgagctccaatcttggtactcagaatcaatcaacgtcggccacgctgacctccgcgacgctgattggtggccggagttatcaaccgtcgacgacctcgtgtcgattctaaccactctaatctggctcgcctctgctcaacgtgccgctctaaactttggacaatacncttacggtggctacgtcccaaaccgacancgttgatgcngcgggtttaatcccgacgantcgattcagaattacgccgagtttcatctccccatccgggagaaantattacttcccggtcnatgccaaattttgggggcaaaacn

SEQ ID NO: 18356 - DNA, 452 bp, Arabidopsis thaliana
  unsure at all n locations
  Clone ID: LIB35-016-Q1-E1-D8
nggccccacgcgtccgccaacgcgtccgcccacgcgtccgtacggctgcgagaagacgacagaaggggacagagatgaattctatatcaatcttggtgtcgctgtccgtatacttcgtgaagatttgcctttgctcttcactagagatcttaattacgacatctacagggatgatataacatttgtggatccgatgagcacattcactgggatggacaactacaagattatcttctgggcactcagatttcatgggaagatattgttcagagatatctcacttgagatcttcagagtatggcaaccatcagagaacatggttctcatcangtggaatctcaanggtgtgcctanagttccatgggaaantanagggagagtttcaagggcacttctcggtanaaactcgaccgtaattggcaaaatnctatgancataaagtcgataacttg

SEQ ID NO: 18357 - DNA, 487 bp, Arabidopsis thaliana
  unsure at all n locations
  Clone ID: LIB35-016-Q1-E1-F4
tcnaactctgtctgctctccgacatcagaggtngccccgngcgtccgccnacgcgnccgtacggctgcgagaagacgacaaaagggatatcatcaaaagagttctacgaagatcaatctccagcggtgaatgcagcaatacgcttacaacagcgatgcagtgagaaagttggtaaagatgcaaatgatttagcaatctctacgcgtttacttgtatcgagttcccaaatcgggtgtctcattggaaaaggtggagcagttatatctgagatgaggagtgtaacaagagctaatattcgtattcttcaaaaagaagacgtaccaaaaattgctcgtgaagatgaagagatggttcagattacanggaagtcctgatgccgctatgaaagctctcacgcaagtaatcttgcgattaagagctaactctttcgacatggattatggacttgtcttgctaccaacatcntttccatatatccctcaagtga

SEQ ID NO: 18358 - DNA, 473 bp, Arabidopsis thaliana
  unsure at all n locations
  Clone ID: LIB35-016-Q1-E1-G3
ggccctccgatnttccaaaggtngccccacgcgtccgcccacgcgtccgtacggctgcgagaagacgacagaaggggggagattaaaattttccagagataaaaccctagagagattctcatcttcttttcttcaatctctctgagaatttctaggttttcgttaccgattgggtcaatctggtgaaactcaaggttgagatcagataatttaattggaagattttaggttatggagaacagaggccagaaacgaatggaggttgtggaagagctacctgctgataagagagcttgtaactctcaggattttagaccaagcacattcggatcatctgttcaagctcaagctaatgatacgaatccaggacatgaaaacgttgacgctgatatggatacttcttcatctgcttcgccttcgagtcgatnagatgaagaanaacaagaagancaggataaggaggattccgacta

SEQ ID NO: 18359 - DNA, 475 bp, Arabidopsis thaliana
  unsure at all n locations
  Clone ID: LIB35-016-Q1-E1-H1
ctagccgtccgacattccaaaggtngncccacgcgtccgtaaaagctgcgagaagacgacagaagggcttcctcagcgatgatagcacattgaggcctgttgccattgagttgacttgtccaccaaatatcaacaagccccaatggaaacaagtcttcacgccaggctatgatgctacgtcatgctggctatggaatcttgctaagactcatgctatctctcatgacgccggttatcatcagcttatttcccattggttgaggactcatgcctgtacggagccatacataatagcggcaaatagacaactaagtgccatgcatcccatttataggcttttgcatcctcatttccgctacaccatggaaatcaacgctcgtgcacgccaaaagtcttgtcaacggaggtggaatcattgagactgtttctggcccgggaagtatgcatanagctaagttcaaccgtctatggtaaa

SEQ ID NO: 18360 - DNA, 496 bp, Arabidopsis thaliana
  unsure at all n locations
  Clone ID: LIB35-016-Q1-E1-H11
aactgtcntcctgntctagccctccganatccaangtngncccacgcntccgtanaagctgcgaagaagacgacagaaggggggagcgattcggtcaaaaccaacgctggattacacagcagaagatttctcgtttcatatttcgacaaacttagaatctgcttatcatctgagccagcttgcgcatcctctgcttaaggcttcaggatgtgggaacataattttcatgtcctctattgctggagttgtatctgctagtgtcggctccatctactctgcaacgaaaggggtattgaatcagctagcaaggaacttggcatgtgagtgggctagtgatggcattagggctaatgctgtggctcctgcagtcatcgcaactcctttggctgaagctgtgtatgatgatgagttcaagaaagtggtgatatcaagaaagccgttggggcgtttcngggaacctgaaanaagtttcctcgcttgtgggcttttctatgtt

SEQ ID NO: 18361 - DNA, 502 bp, Arabidopsis thaliana
  unsure at all n locations
  Clone ID: LIB35-016-Q1-E1-H12
ccccagttccatgcncacggtnaccangcccgnccgaccgtaaagctnaaagaagacgacagaaggggtggagttcaatttggaaaaggaagcagagangaaatttgcattgaaccttttgggtctatatcagaatatcaagacaggcagtcagcgtttatgacgatttatctcatggtattgacagaactgccgaattaacggttggacgctttggtggtatcnatgctttagcacaggagtatggacaaggtatggctaagcaanggatggatgtattactttccacattatcaaaagctattcaatcctgttggngacatctcataaaggccaaattgttggggttaaccgtccctgatngagaagagttaaccaagaatcacnaaaaatccnttttgaacctttgggtcctccccgttcaacctgcacgccncaaanggtggaaattgganggnaantccanttnnaacccattatcncctgaaggttaaacctgttn

SEQ ID NO: 18362 - DNA, 405 bp, Arabidopsis thaliana
  unsure at all n locations
  Clone ID: LIB35-016-Q1-E1-H7
agaagaaaaaaaaacagagtagagattgataaaaaaaaaatgagtagctccgattctcctcagcttcacaatatcttcgtctatggtagctttcaagagcctgacatcatccatgtcatgcttaatcgtattcctgagattgtctctgcaacacttcctggctttaagagatttaggcttaaaggacgtttgtatccatgtattatcccctctgagaatggagaagttcatggaaaggtactaatgggattgactaatgatgaacttgagaatgtagattgggttgaaggaaacgaatacgaaagagtgtttgttgaagttgtaagaaaaagacaattctgagaagatgagagtggaaacatatccatggatnaacaagaatgatctgatattggtggagaatgg

SEQ ID NO: 18363 - DNA, 422 bp, Arabidopsis thaliana
  unsure at all n locations
  Clone ID: LIB35-016-Q1-E1-H9
gtacgggctgcgagaagacgacagaagggggagaaagatcgaatcgaagaatggcagaattcgttgaagctgataacgcagaagcaataatcgcgaggatcgaaaccaaatcgaggaagattgaaagcctactcaaacagtacaaacatgtagaagctttgaaaacggctcttgaaggttcgcctccgaaaactcgcgatgaacgttgcaagtcggctaattggatagttgtgcacagagctttaatggccattaaggatattgacggaatgctcaatgctcttgatgtcgaatattacgacattctcatgaagtacttgtacagaggactttctactggggancgacccatctgcgatnagtgcctgaaagattcacgaagaaactcactgagaagagctggtctcngttgcattctccga

SEQ ID NO: 18364 - DNA, 453 bp, Arabidopsis thaliana
  unsure at all n locations
  Clone ID: LIB35-017-Q1-E1-A11
gcnaagacgacagaaggggagaccaacaaataaacattaaacccaaatgatatattttgggtaagatcaatcgacaatcattatacaacaatgatgacaaaaacattggagattgatttgagatcagcagaagggcttaagctaaaccgaagacccatcaagaaaaagactttcgccgtcgtaaaaatcgacgagaaatgtcgaaaatctaatcttgacgaatcgagaagaagcaatcctacatggaactataaatcagagatgcccatcaatggtaatgaacagtttatcttcattgaggtattttatcgaacaggttctgggcatgataaaaaaatcggagaagctaaaatcccaacgaatgatttcatgggaaggtattcacctgaaggtcacttaaacttcttgagctatagattgagagatgagtttggtgataagtgtgggatcgtc

SEQ ID NO: 18365 - DNA, 468 bp, Arabidopsis thaliana
  unsure at all n locations
  Clone ID: LIB35-017-Q1-E1-A12
gcgtccgtacggatgcgagaagacgacagaagggggagaaaaagagatggaaagaaaaaagttttcttcaaaatttattcatttgctcattgtgtttttgcttctttgtacgtttctttctcgtaccgaatctgctcttccttatcaccatgaactgttcttggggaggaagcggatgaattattataagcccaacagtgccataggaacaccatcatcaactagtggccacgctccaggcagtaatgggaggaagttgatgagtatatatagacccaatggagacatatttacaggaccatcaggcagtgggcatggtgggggtcgcactccagccccctaagtatatatatattaatgtgtaatcaaggactcacaagcgaagcttttaattctcgatnacgtataacgtatgcgttggtgtagtatatgtttaatttctgttttcacaagccaagtttttcattt

SEQ ID NO: 18366 - DNA, 413 bp, Arabidopsis thaliana
  unsure at all n locations
  Clone ID: LIB35-015-Q1-E1-A10
tacggctgcgagaagacgacagaagggtacggctgcgagaagacgacagaagggtacggctgcgagaagacgacagaagggtacggctgcgagaagacgacagaaggatacggctgcgagaagacgacagaagggtacggctgcgagaagacgacagaagggtacggctgcgagaagacgacagaatggtacggctgcgagaagacgacagaagggtacggctgcgagaagacgacagaagggtacggctgcgagaagacgacagaagggtacggctgcgagaagacgacagaanggtacggctgcgagaagacggcacaagggtacngctgcnaaaagacgacagaaggggaaaaatanaattataaaattaaacctatgaatatgagcaatccctcnataaatctgaacct

SEQ ID NO: 18367 - DNA, 512 bp, Arabidopsis thaliana
  unsure at all n locations
  Clone ID: LIB35-015-Q1-E1-A2
cggtttttcggccncccggtccgganaaaacgggtcgacccacgcgtccgaagaagaaagaaggggctgtcgggantaaacgagtcagagacgggttanacctcgactcgccggacgtgaagcggttaagagatgatttgttcnatgactcngggcttgacccagtgagtcaagatcttgactcggtgatgaagagtttcgagaatgagttatcgacaacgacggcggcgctaagctccggtgaaactcaaccggatcttggataccttttcgaagcttctgatgacgagctgggtttgccaccgccgcttacgccaccgcanacgcntcttcctccgtcgngtgaagaaacggtgacggaattggtacnagcctcgtccggattcatcanangtttggnnaattatgttggttttgaggatcatgttacggaagttcggaccttgccatcttggtgaatatgggcntttcgaataatttcgatgggtgtttaagattccggcgnattgttt

SEQ ID NO: 18368 - DNA, 551 bp, Arabidopsis thaliana
  unsure at all n locations
  Clone ID: LIB35-015-Q1-E1-A3
tgtttngggcccgccctatcgcgtcataaganactggttngaccnancgcgttcgnccnaaannntccggaagacgacagaagggggactcttcattggntttcntctcctcctaatnccctcttcaatttcctcctcctgatcgccagttgattttanggcttctggcaaacgaaagaagatggcttttagtccggaggtgttgggcgatgtccctgctaatcaagaacagtggtgangttgaagagcctcgctcgtttcgctgtcgatgaacacaacaagaaagagaatgcacttcttgagtttgcganagttgtgaaaggcgaaagaacaagttgtanccggaacactgcatcacctgactctggagattctcgaagcangacagaagaagctttacgaagccnaagtntgggtcaagccgtgggttggacttttaaagaattacaagagttnaaaccctgccaattatgcccctngctaacacttcctnccgatttttggctgccaagccaaggtggacatnaatcctggattgaagggaaatttcc

SEQ ID NO: 18369 - DNA, 539 bp, Arabidopsis thaliana
  unsure at all n locations
  Clone ID: LIB35-015-Q1-E1-A1
ctggtttgcctgcgcctacgggtccggaaatcccggggtcgacccacgcgtccgcccangcgtccgcccacgcgtccgtacggctgcgagaagacgacagaaggggggggtcacagtgaccaggcccgggcgactgtttaccaaaaacataggtctccgcaaagtcgtaagaccatgtatgggggctgacgcctgcccagtgccggaaggttaaggaagttggtgacctgatgacaagggaagccggcgaccgaagccccggtgaacggcggccgtaactataacggtcctaaggtagcgaaattccttgtcgggtaagttccgacccgcacgaaaagcgtaacgattctggggcactgtctcggagaaaaggctccgtgaaataaacatgtccgtnaaaaattccggactaactgcaacttggacaanaaaagaaccctaatgaaacntcaatgttccctggggaatggcttttgggcntttcctgcgcaaccttaaagttggaaaggcgaaanaaaggccccccttcccgggggggg

SEQ ID NO: 18370 - DNA, 505 bp, Arabidopsis thaliana
  unsure at all n locations
  Clone ID: LIB35-015-Q1-E1-A4
actggtttntctggccctcccgggtccggatatncccgggtcgacccacgcgtccgtacagctgcgagaagacgacagaagggtacggctgcgagaagacgacagaagggtacggctgcgagaagacgacagaagggtacggctgcgagaagacgacagaagggtacggctgcgagaagacgacagaaggggacgatgaatcgattttatagctccgatattgttattcatgatatttctttcattcgatatcatcgcaatctaattcatctgagtaagtttacaagcgaaagatttctcatctctatgggattaaatcccgagatattccannnnnnnnnnnnnnnnnnnnnnnnnnnnnnnnnnnnnnnnnnnnnnnnnnncctgcatttattgctactgcactcttcaatcctcgttccctactggcntttttgccntatnattttacgtnaaaaaccgttagtcanaattgattnnnttgaaataaaatttttactatcca

SEQ ID NO: 18371 - DNA, 252 bp, Arabidopsis thaliana
  unsure at all n locations
  Clone ID: LIB35-015-Q1-E1-A5
ctgcgagaagacgacagaagggtacggctgcgagaagacgacagaagggtacggctgcgagaagacgacagaagggtacggctgcgagaagacgacagaagggtacggctgcgagaagacgacagaagggtacggctgcgagaagacgacagaagggtacggctgcgagaagacgacagaanggtacggctgcgagaagacgacagaanggtgtgcaaaanaaaanaacananannaaaaaaaaaagcggcc

SEQ ID NO: 18372 - DNA, 268 bp, Arabidopsis thaliana
  unsure at all n locations
  Clone ID: LIB35-015-Q1-E1-A6
aaggatacggctgcgagaagacgacagaagggatgaacgtgaagatgactggcaaatgctctgatcatgatcatcgtcaaacattttaacaatctcaagctacaattctttttttccttttgttaaccagttctttgttttttatatgtgttggtgnnnnnnnnnnnnnnnnnnnnnnnnnnnnnnnnnnnnnnnnnnnnnnnnnnnnnnnnnnnnnnnnnnnnnnnnnnnnnnnnnaannaaaaaancaaaaaanaaaaaagcggcc

SEQ ID NO: 18373 - DNA, 513 bp, Arabidopsis thaliana
  unsure at all n locations
  Clone ID: LIB35-015-Q1-E1-A7
tttttttggccgccctacggtcangataatcccggggtcgacccacgcgtccgacggatgcgagaagacgacagaagggagaaggaccaatctataatagctgaaattagattcaaccatgatcatgaatgggtgatgagcaaatatagagaagtcattgagttctggagaaatgaacgagaagctgggtacactcctgaagaagaacgttggaaatgtcggtattgccaatttgctaagtcttgccctggaaacccgagtttcgaatctcctagcacaagctcaccaacaagagaggctcctcctttaccaagctaaaaagaagatgaaaagttgattctttcaccgaaagctgctaaatgctaacatatatgtttgtgttgtcttaatttccacatttgcctcccttaaattgcatancaattaagtgattaaaccgtggtttgattaaggttggtaagcctnncaaagattgatttgttccggggatgccccaatttgattaatggtgta

SEQ ID NO: 18374 - DNA, 405 bp, Arabidopsis thaliana
  unsure at all n locations
  Clone ID: LIB35-015-Q1-E1-A8
aagatgataaggaggagagtgatggtgttgttgttaaggaagcttcttggatagatttgtatttaccagaagaagttagaggttatgctaagcttgctcgattggataaacccattggaacttggttgcttgcgtggccttgtatgtggtcgattgcgttggctgctgatcctggaagccttccaagttttaaatatatggctttatttggttgcggagcattacttcttagaggtgctggttgtactataaatgatctgcttgatcaggacatagatacaaaggttgatcgtacaaaactaagacctatcgccagtggtcttctgacaccatttcaagggattggatttctcgggctgcagttgcttttaagcttaaggattcntctccaacttaacaattaca

SEQ ID NO: 18375 - DNA, 462 bp, Arabidopsis thaliana
  unsure at all n locations
  Clone ID: LIB35-015-Q1-E1-A9
ccctacggtccgganattccggggtngncccacgcgtccgtacaagctgcgagaagagacagaagggatanaaatagnaagtgatgatccagttggagtcagcttctaaatatctgtantgttaatggtggnacattatatccatatttttaatttcataattaatgttagaaccacaaagcatgcncaaatggaaaaaaaaaagcggccgctctagaggatccaagcttacgtacgcgtgcatgcgacgtcatagctcttctatantgtcacctaaattcaattcactggccgtcgttttacaacgtcgtgactgggaaaacccnggcgttacccaacttaatcgccttgcagcacatccccctttcgccagctggcgtantatcgaanaggccgcancgntcgcccntcccaacagttgcgcagcctgaaaggcgaatgggacgcgccctgtnaccgggc

SEQ ID NO: 18376 - DNA, 368 bp, Arabidopsis thaliana
  unsure at all n locations
  Clone ID: LIB35-015-Q1-E1-B10
ctgcgagaagacgacagaagggtacggctgcgagaagacgacagaagggtacggctgcgagaaagtaaagagaaaaaccctaatcttcatcttcatcttctcccgccgtcggccgtaagaggtttcgaagaagcaaagtgagcaacaatggcgggaggcaagatcaggaaggagaancccaaggcttcgaatagagcaccatcgaaccattaccaaggaggaatatcgttccacaaatcgaaagggcaacatatccttaagaaccctctgcttgtggattcnatcgttcaaaaagctggtatcangagtaccgatgttgattctccnanatnggtcccngtactggaaaactttacnaagaaacctct

SEQ ID NO: 18377 - DNA, 409 bp, Arabidopsis thaliana
  unsure at all n locations
  Clone ID: LIB35-015-Q1-E1-B11
aagaaagaaataaaatagaataagagaacttgttgtagcagttgaagcagaaaataaacagagtaacgaatccaacatcacaaaacannncacaaactaaaaaatggctctgaatagtgtctcctctgaagaatttaccttcccatcgctagcttctcatgattcttctcaccattccggtcttgattcacctcctttgtggaaacactcaccggttacttcctttcgccggaaagattacgactttggtttggcaagattagtcattggaaaagacggtgatcatgatcagaggaagagcttctcgtacgtggagatgagaaatcgttggatcgacgacaaagaanaggagaaaatggatatgttatgggaagatntcaacgaagaantgcctccaaaaanttcgggt

SEQ ID NO: 18378 - DNA, 443 bp, Arabidopsis thaliana
  unsure at all n locations
  Clone ID: LIB35-015-Q1-E1-B5
aaagaagacgacagaaggggaacgaggttgacattaggcgaaaggatcttctgccggtatatgataattttcacagtgtgtataccagtatgcgcaacagaggattttctggggaaagagattcagattcttcttcttcttctgaccctggacaagttaaagaaatgcatccattcaatggtatggtttaccccgaagatgaggaaagaagagggagtgcccattttgcactaactccaaaccaaaatcctcataccggaattgtaacatttaaacagcctgtagtttccatttcttctgctgtgaaagacactgattatatagacgacgacgctcatgtcttgccaaagaacgcctccctgcccgctgaaacaaaanttganaacagcagtngggataagtggagattcaaatgtnagttctaaccgttctgtctgacnttg

SEQ ID NO: 18379 - DNA, 506 bp, Arabidopsis thaliana
  unsure at all n locations
  Clone ID: LIB35-015-Q1-E1-B6
ctttctgcgcgccctaccggtcaagatatcccgggtcgacccacgcgtccgtacagctgcgagaagacgacagaagggggcagacgcagccatgggtatcgatcttatcgcaggaggtaagagtaagaagaccaaaaggactgctcctaagtccgatgatgtctacctaaagcttctcgtcaagctttaccggtttttggtgaggagatctaacagcaacttcaatgctgtgattctgaaaaggcttttcatgagcaaagtcaacaaagctcctctttcactctctaggcttgtagagttcatgactggcaaggatgacaagattgctgtgttggttggaactatcactgatgatttgagagttcatgagattcctgccatgaaggttactgccttgaggtttactgagagggctggggctanaattgagaaagctggtggagagtgcttaacctttgaccagcttgctctcagagctccattgggacagaacacagttcttctta

SEQ ID NO: 18380 - DNA, 435 bp, Arabidopsis thaliana
  unsure at all n locations
  Clone ID: LIB35-015-Q1-E1-B7
aagacgacagaagggggaacctttaaaactcagattttatctctcttcagtctccacgctgcttgaaactgaagcagagaagcaaagagatgtcttttgaggagtttacgccgttaaacgagaagtctcttgtagactacatcaagtcaacacctgctctctcttccaagatcggagccgacaagtccgatgatgatttggttatcaaagaagttggagatggcaatctcaatttcgttttcatcgttgttggatcctctggttctcttgtcatcaaacaggttcttccatatattcgctgtatcggtgaatcatggccaatgacgaaagaaagagcttattttgaagcaacaactttgagaaagcatggaaatttatcacctgatnatgttcctgaagtctaccattttgacagagcaatggcttgattggaat

SEQ ID NO: 18381 - DNA, 422 bp, Arabidopsis thaliana
  unsure at all n locations
  Clone ID: LIB35-014-Q1-E1-D7
aactctaaaccacactgagatggcgaaatggtggcgaggcctgagatccgtgacggcggaggtggctgatcttccggcttcttcattcggtcgatcgattcgatgtattcatcagtatcagacgatccaggcgattccacgtgaagctacgggtcgaggagtatcggctcgggatcggacgattggtcgtattcccgccgtcgttttcccgcaatcgcttctagatactgatgcttcgaagcgangcgtgtcgaggaagcagctattgacggcggataagaagcaagatnaagtctattattgactctgttggtctcccattcntctgttctaccactttccagcttcagattcgaactggtcaagggttcctcgacgcctttttgnatccnggtcnaagtttcttcccccccaaagggtnc

SEQ ID NO: 18382 - DNA, 488 bp, Arabidopsis thaliana
  unsure at all n locations
  Clone ID: LIB35-014-Q1-E1-D9
ttttgagaatcgtttggccttctaccggtcttgntatcccgggtcgacccacgcgtccgtacnnctgcgagaagacgacagaagggggggggtcgcagtgaccaggcccgggcgactgtttaccaaaaacacaggtctccgcaaagtcgtaggaccatgtatgggggctgacgcctgcccagtgccggaaggttaaggaagatttctcaagaacactcgcggagagacctgttgctgatatttcnaangtgcttcatnagctanataccctgccttccaagatatctnnnnnnnnnnnnnnnnnnnnnnnnnnnnnnnnnnnnnnnnnnnnnnnnnnnnnnnnnnnnnnnnnnnnnnnnnnnnnnnnnnnnnnnnnnnnnnnnnnnnnnnnnnnnnnnangatgaatggtgtgtgctaagcaagtgtgttgcctttgtgtggaaatgaanaagtacttcgaagacttgcgtttatcagtttantgttg

SEQ ID NO: 18383 - DNA, 458 bp, Arabidopsis thaliana
  unsure at all n locations
  Clone ID: LIB35-014-Q1-E1-E6
tctctactcttgtcgtcgttggaagaagaggaagagagaggacaagagaatcataagaagaagacatagtcatgggagaggtgaaagtagacgacgatgcgattcttaaatccttcctcgccgaggtcggagaagttgagagagataacgaagtcggcaggattctctcatgcttcaagctgaattcgtttgagcatcttaacctctctttcgattcttccacggatgatgttaaaaggcagtacagaaagatttctttgatggttcatcctgataaatgcaaacatccataancacangaggctttcggagcattggnacaagcgcaacaactgctgctnaacgaccnagaaanagattatattcctaccnagtccntgcngcagaagnangagcttcnatgaagagananaaacngtttnngaananccgcctctnaaataaagtccctgggttng

SEQ ID NO: 18384 - DNA, 416 bp, Arabidopsis thaliana
  unsure at all n locations
  Clone ID: LIB35-014-Q1-E1-D11
ggctgcgagagacgacagaaggggggaaagaagaagaacggctgagttaaaaaacaaccttgaatcttatatatatgctaccaaagagaagctggaaacacccgagtttgaaaagatatccacccaagaagagcgcaaggcgtttgttgaaaagcttgatgaggtgcaagattggctttacatggatggagaagatgctaatgccacagagtttgagaagcggcttgactcacttaaagccatcggcagtcccatatctttccgatcagaggagcttacagcacgaccagtagcaattgaatatgctaggaaatacctaactgaactcaaagagatnataaaagaatgggangcgaacaaaacttggcttccaaaagaaaaaatcgacgangtctcaaaggaagcagagaaagtta

SEQ ID NO: 18385 - DNA, 256 bp, Arabidopsis thaliana
  unsure at all n locations
  Clone ID: LIB35-014-Q1-E1-F12
tcttactgggcgggnctatcggtntantccatcccgggncgacccacgcgtccgnacaantgcgagaagacgacagaagagtacggctgcgagaagacgacagaagggtacggctgcgagaagacgacagaagggtacggctgcgagaagacgacagaagggtacggctgcgagaagacgacagaagggtnnnnnnnnnnnnnnnnnnnnnnnnnnnnnnnnnnnnnnnnnnnnnnnnnnnnnnnnnnnngcggcc

SEQ ID NO: 18386 - DNA, 551 bp, Arabidopsis thaliana
  unsure at all n locations
  Clone ID: LIB35-014-Q1-E1-F5
tttgttctcctggggtgnacgaatccggacntcgcgcngtcgacccacgcgtccggctgagagaaagacgacagannnnnnnnnnnnnnnnnnnnnnnnnnnnnnnnnnnnnnnnnnnnnnnnnnnnnnnnnnnnnnnnnnnnnnnnnnntggctagtggaatcgctcgtggtcgtttagctgaagagaggaaatcgtggaggaagaatcatcctcatggttttgtggcaaagccggagacggggcaggatggaactgtgaatctaatggtgtggcattgcactatacctggcaaagctgggactgattgggaangtggattctttccattaacgatgcacttcagtgaggattatccgagcaaacctccgaaatgtaaatttccacaagggtttttccancctaatgtctatccatctggaactgtccngtctctctatncctaaccgaggatttatggatngagaccanncctctccntnnaacccnattcctgttggnattcacnggttttcntttcaccaccgaatccccctgaacctggacanaac

SEQ ID NO: 18387 - DNA, 220 bp, Arabidopsis thaliana
  unsure at all n locations
  Clone ID: LIB35-014-Q1-E1-F6
ctgcgagaagacgacagaagggtacggctgcgagaagacgacagaagggtacggctgcgagaagaccacagaagggtacggctgcgagaagacgacaaaagggtacggctgcgagaagacgacagaagggtacggctgcgagaagacgacagaagggtacggctgcgnnnnnnnnnnnnnnnnnnnnnnnnnnnnnnnnnnnnnnnnnnnnnnngcggcc

SEQ ID NO: 18388 - DNA, 497 bp, Arabidopsis thaliana
  unsure at all n locations
  Clone ID: LIB35-014-Q1-E1-F9
ggaattttcttggcgggtctaccggtcanagattatcccgggtcgacccacgcgtccgcaanaagacgacagaagggggacgacaattcaaacttgtacggactaagaccagactctctctgacgttgtcagatctgcgacctgctagcgagaggatgcgagaggaaactgtggtttacgagcaggaggagtctgtttctcacggcgggggcaagcacaggatccttgcagagcttgcccgcgttgaacaggaagtcgctttcctggagaaagagttgaaggaggtcgagaacacagatattgtatcaaccgtgtgtgaggagctgctatctgtcatcgagaaaggacccgatcctctgttgccactaaccaatggacctttgaacttaggatgggaccggtggtttgaaggaccaaatggangagaaggctgcagatgcttaatactttgattccctagacnnagttatgtgttacatatactagtttcttgctag

SEQ ID NO: 18389 - DNA, 405 bp, Arabidopsis thaliana
  unsure at all n locations
  Clone ID: LIB35-014-Q1-E1-G10
ctgcgagaanacgacagaagggtacggctgcgagaagacgacanaagggggcggaaacaaaaaactaagaacggttccatttgttttcattgtctagannagaagaagaagaaggatgtgtttggtgttcgtgtgtgatcaggacgagagggtgatcggaaggtacgcagctcctgnancgtgtccgtactgcgggaggaacggttcaagtggttgacgtaaatagccagtggagattctgcttcgttcctctctctaataaatcccanacgtcgtccatctctgttccaactttgccggcaaaccnactccatcgtccatgggctgaaaaacanaaactcccacctccataacaanattatttccaanaatgtccatatntcccaaatccctgaacttgccttt

SEQ ID NO: 18390 - DNA, 469 bp, Arabidopsis thaliana
  unsure at all n locations
  Clone ID: LIB35-014-Q1-E1-G11
cttctgcggcggcctaccggtcnaaatatcccgggtccgacccacgcgtccgtacanntgcgagagacgacagaagggggaagtcatggaacaacaacctcatcgaagacgacgcccaaacccaaaaaaggtctacattcggagaacattctccttgacgacnaggactcgtcggctacgggaggcatggtcacaccgccagactcagatgctccgtccaaattcaggaagccacgcgcgcaccggaagaggatggaggacttggagagcctcggtatcagtagcccgttcaagaagtcttctcgaagggccaagaaccccgtttacggaccaagatgaccgcgaaatcttggaggggctggagaagtacggcccagcttggactaaaatccagcgggaccctgcctttcatctacagagcccggcagccgacagatttgagggaccgtgttcgcaacaagacancccg

SEQ ID NO: 18391 - DNA, 506 bp, Arabidopsis thaliana
  unsure at all n locations
  Clone ID: LIB35-014-Q1-E1-G12
gaactggtttcttttgcccggncnancggtaanggacatcccgggtcgncccacgcgtccgcccaancgtccgtacggctgcgagaagacgacagaagggggatctagagttgagaaagtgttggaagctgttcacattgcatccaacanaaacactgttcctgggagatgtttctgccatggttcctggtggaatcagaatgggtactcctgctctcacttccagaggctttgttgaggaagactttgccaangtagctgaatacttccgacaaagctgtgncaatngctcccaaagtcnaatctgaagctcaagggaccaagttgnagggtttcntgtcngcaatgggatcctcctcaaccatncaatccgggattgcgaaactgngccatgaagtcnanggattcgctaagcagttcccaacaaattgggtttgagaaagaaaccatgaagttcnngaactanccgtttcacccncaagtgttttccgttangccttgaattc

SEQ ID NO: 18392 - DNA, 492 bp, Arabidopsis thaliana
  unsure at all n locations
  Clone ID: LIB35-014-Q1-E1-G4
cacggccccggacatcccgaatcgacccacgcgtccgtacanctgcgagaagacgacagaaggggaaagagaaaagctttgagtcttccattgacatgggcgcttagcttatgcttgagatattttgtttttacctccgagaaacggatttagattcgtaatcgtgagttttttggtgtaatggagatcgctactgtcgtaaaggctaatggcgttgtcgattcaagcacatccagataagaaattagcaaagaaaatgcacaaagctcatcctaatctttataaagacgacaatcacaaaccagagatggctttggcctatactcaattcgaggctctctgtggctttatacctcctcaggagcttaagaatgtcattccgagctaatcccggagaattgaagaacttgtttgganttgaanaancaaaacaagttttctgtatcactggacatgattagggaaaaatntaatctgttttcccaaaaacct

SEQ ID NO: 18393 - DNA, 497 bp, Arabidopsis thaliana
  unsure at all n locations
  Clone ID: LIB35-014-Q1-E1-G9
gaattttcttcgcgcttctaccggtcangancatcccgggtcgacccacgcgtccgcacaancgtccgcggacgcgtgggcggctgcgagaagacgacagaaggggaggtagtgctgaaacacacaggagacgacgagtcgtgttcgccacgtcagatggctgagaacatcatctcttacctgcaaaacaaaggttatcttgagggctaagtcaaagtcggaaaaatcaacccaatttgtcgattctatatatggctaaaggattgttctccctgattcggtcagaagcttgagacctggaaacgatgtcgtctcgcttcgtcacactatcatttgttcttgaattgtgttgaagtcaaaagccaaagggaatatatctatatttgttctaatcatcatttagttagtttataaaagagttttgctncaatgatatcgactgtgttgtataatgtgaatnataaagtnggatttcgttgtatttaccaaanaaaaaa

SEQ ID NO: 18394 - DNA, 499 bp, Arabidopsis thaliana
  unsure at all n locations
  Clone ID: LIB35-014-Q1-E1-H6
caagcgtccgtacggctgcgagaaaacgacagaagggctgataagggaaagtttcttctggcggcgcggaggtttaggaccggtgcttacactgagtacatcatatcacttgatgctgatgatttctctcaaggaagtaatgcctacgtcggaaaattaagatcagattttcttgggaccaactttacagtatacgatagccaaccaccacacaacggagcanaaccttcaaatggcaaagccagtcgcangatttgcatcaaagcagataagccctcaagttccagcagggaacnttgaagtccggtcatgtttcntagnaattcaaccntttnaatcaagnagtccnaagaagaatggtaagcacactnngggncccatcaagcntcaaccttcancaagcatccgctgggnctcccgtcttgaacaaaangccatgtgatgttgnccangctnattgnccaaaacccacaagggtgggntccaaccttgggatacg

SEQ ID NO: 18395 - DNA, 476 bp, Arabidopsis thaliana
  unsure at all n locations
  Clone ID: LIB35-014-Q1-E1-H9
tatggtataatatcncgggtccgacccacgcgtccgaaaaaacgtccgcccacgcgtccgtacggctgcgagaagacgacagaagggtacggctgcgagaagacgacagaagggggcgatcggagaagaaaaagctcgagagacgccatggaaatttcccaagctcgttcaagcttcgtttgtcttcttcttctgttactctccatgtgtttcgttccctgcgtcttttccaaatctcctcgtcctatctccgatgtggagatcaggcagaagaagagcgaatgctacggtgatatagagagtgggttatggggttggcaatgcaaatcttctgcagtagcgaangagaattgtgngctgcgatgcctttctcnggtttgctatnaactcatttatgagagtgatccgcttgaanaaagtgaataagatttgattaggagccaagagtacaaggtantgtattacaactcatcact

SEQ ID NO: 18396 - DNA, 421 bp, Arabidopsis thaliana
  Clone ID: LIB35-013-Q1-E1-F8
ttgacaaatctctcaaaaccatttgttttgcaatcgcagatccgtttttcttcgggtctcatcacaatgaatggtttctctgatcttaatccttctgagagcaaaccttctctgtcacaactagctccattagaagccattctgtttgatgttgatggaacactctgtgactcagatcccatccaccttattgccttccaagaactgcttcaagagattggttttaacaatggtgtcccaatcgatgagaaattttttgttgagaacattgctggaaaacacaattctgaaattgctctacttctgttccctgatgatgtttcaagagggttaaaattctgtgatgaaaaggaagctctttaccgcaaaattgttgcagagaagataaagccacttgatggggcttataaaactgaccaaa

SEQ ID NO: 18397 - DNA, 506 bp, Arabidopsis thaliana
  unsure at all n locations
  Clone ID: LIB35-013-Q1-E1-G1
ctggttcccttacgtangcctccggaaatcccaangtcgacccacgcctccgcccacgcgtcangtacggctgcgagaagacagaagggtacggctgcgagaagacgacagaagggtacggctgcgagaagacgacagaaggatacggctgcgagaagacgacagaaggggacaacgaaggcatcttcttcatcaattgatctactctgctctgctcaagatcagaaatcgtcggtttagttctccggttaaaagtttcgtctctgcgggaattggaacttcaatggagggattaaagctctcagaagcggaattgatgatttttattcatccttcccaaaacaaaaacgtttttcaaggaatttgtcccgagctcagttctcttctattccaatataatgaaacctttgatggagttctattggcttatgatgctactgtgaaaaagcaaacaagctaaaatcccttacangacttcatccttactttggcgtcagagttaacac

SEQ ID NO: 18398 - DNA, 266 bp, Arabidopsis thaliana
  unsure at all n locations
  Clone ID: LIB35-013-Q1-E1-G2
ncangcgtcngtacggctgcaaaaaaagcngccgctctaaangatccaagcttangtacgcgtgcatgcgacgtcatagctcttctatagtgtcacctaaattcaattcactggccgtcgttttacaacgtcntgactgggaaaaccctggcgttacccaacttaatcgccttgcagcacatccccctttcgccanctggcgtaatatcgaanaggcccgcaccgatngcccttcccaacagttgcgcancctgaatggcgaatgg

SEQ ID NO: 18399 - DNA, 422 bp, Arabidopsis thaliana
  unsure at all n locations
  Clone ID: LIB35-013-Q1-E1-F6
agaggatgaccaaaatgacagagagtgtagcaaacagcatactgtctggagtccttaaagtttctggattcttcacaagttcagtggcaaacaccaaagtaggaaagaaattcttcagccttcttcctggagaagtcatccttgcatctctcgacggatttaataaggtctgtgacgctgttgaagtagctgggaggaatgtaatgtcaacctcttccactgttacaaccgaactcgttgatcacaagtatggtggtaaagcggctgaggcgacaaacgaagggctcggtgcagcaggatatgcgcttggcacagcctgggttgctttcaaaataagaaaggctattaacccgaanaatgtactcaagccttcgacgcttgcaaaaaccgccattanatctgcagcttcacaaaaaaaagcc

SEQ ID NO: 18400 - DNA, 503 bp, Arabidopsis thaliana
  unsure at all n locations
  Clone ID: LIB35-013-Q1-E1-G3
ctacggctccggatgatcccgangtcgacccacgcgtccgcccangcgtcngcccacgcgtccgtacgagaagacgacagaagggggattcaaacgcatttgggtaggctgagagaaaagaaaagaaaaagataaagatggatcacgcagcagacgctcaccgtacggatttgatgactattacaagattcgtgttgaatgaacaatcaaagtatccagaatctcgtggtgatttcaccatttttgcttagtcacatcgttttgggttgcaaattcgtttgcagtgctgttaataaggctggtttggctaagttaattggacttgcaggggaaacaaacattcanggtgaagagcaaaagaaacttgatgtgctcccctaaagatgtccttgtcaacgccttgggtaacantggtaagaactccgttcctgtcctcggangaaagatnaaggaagctacctttgtggagccatccaaaccttggaaaattactgtgtttgttt

SEQ ID NO: 18401 - DNA, 417 bp, Arabidopsis thaliana
  Clone ID: LIB35-013-Q1-E1-G5
cagaatctgagatcggatctttagagagagagagaaagatgcagagggacgtgtcgagctgcaacacttacaactatggagacgctctctattgggacgctcgttacgtgcaagacgcgctttctttcgactggtaccaatgttactcttctctccgcccttttgtccgcagcttcgtctctacttcttcacgagtcctcatggttggctgtggcaactccctgatgtcagaggatatggtgaaggatgggtatgaggacatcatgaatgttgatatctcttcagtggctattgagatgatgcaaaccaaatatgcatctgttcctcagctcaaatatatgcaaatggatgttagagatatgagttactttgaagacgattcctttgacactattattgataaaggaacccttgatt

SEQ ID NO: 18402 - DNA, 486 bp, Arabidopsis thaliana
  unsure at all n locations
  Clone ID: LIB35-013-Q1-E1-G8
ccgagtccganattcccgggtngacccacgcgtccgcccacgcgtccgtacgggcgnnnnnnnnnnnnnnnnnnnnnnnnnnnnnnnnnnnnnnnnnnnnttctaggaaaaatccgatactctttggacagtctatggccaccgatctctacggcgatctctttccggttatcacttcgtcactacacatttgcttcttccgttttcgtatcggatcgaatactattcatctttcttcgaatcgggtttctttgaacctttgaagctatgggtgatgcaatcgatttgagtggagatggtggcgtcttgaaaaagattgtaaggagtgccaaacctgatgctatttcaccctctgatgatcttcctgttgtcgatggtatgttcttaagattgactaagtgatcagggtcaatatattgttcatctactgcttatgctactcctaattatatgtgttgatgaaggaccataaccctgtttgatttn

SEQ ID NO: 18403 - DNA, 495 bp, Arabidopsis thaliana
  unsure at all n locations
  Clone ID: LIB35-013-Q1-E1-H2
acggccccggtgntcccgaagtcgacccacgcgtccgtacagctgcgaagacgacagaangggggggtcgcagtgaccaggcccgggcgactgtttaccaaaaacacaggtctccgtaaagtcgtaagaccatgtatgggggctgacgcctgcccagtgccggaaggttaaggaagttggtgacctgatgacagggganccggcgaccgaagccccggtgaacggcggccgtaacaataacggtcctaaggtagcgaaattccttgtcgggtaagttccgacccgcacgaaaggcgtaacgatctgggcactgtctcggagagaggctcggtgaaatagacatgtctgtgaagatgcgtaactgctgtgactactgaatgtgcttttgatgcattgaatgcggcgtccttacttnaaagagaantnnaagatgcctccananccgaaggaaattcattggaaaagaaantttctgccttgaaaagccaattaaat

SEQ ID NO: 18404 - DNA, 489 bp, Arabidopsis thaliana
  unsure at all n locations
  Clone ID: LIB35-013-Q1-E1-H6
tacaatcgcacatcccgggtngacccacgcgtccgtacagctgcgagaagacgacagaagggggacgaagacaaaacaaaanaagcttcccccaagaacaaaaagttagcatagatgaagagtcttcgggttttgtagtttttgtaaaacagaaaaaaaaaaagagaagaagagatgggaggttgctgttgttgttcttcttcacgaagagctgatgtagataatggacctgcgtactactacccaagggcaacanaagagcgtgtgcctttatcttccgctcataacaggacttcctctgcaatctctactggtgttgtantagtagacacaaacttagagacatcatctcctgatgcttatataccaccgccactgcctacccctttcgatgtgcctatagggattcctcaaacaccagctagtggtgaagaggctacttgtgttgatataagagaagtttcggtggactctgctaataccgagtct

SEQ ID NO: 18405 - DNA, 409 bp, Arabidopsis thaliana
  Clone ID: LIB35-014-Q1-E1-A10
gaagggtacggctgcgagaagacgacagaagggggtggaccaaaatcgtccattgaagtgaacagtcagcatcgttttgcttgcttgtgcgtttctctcgaactctctccatggctgttgcgcttcaattcagccgattatgcgttcgaccggatactttcgtgcgggagaatcatctctctggatccggatctctccgccgccggaaagctttatcagtccggtgctcgtctggcgatgagaacgctccttcgccatcggtggtgatggactccgatttcgacgccaaggtgttccgtaagaacttgacgagaagcgataattacaatcgtaaagggttcggtcataaggaggagacactcaagctcatgaatcgaagagtacacctgtgatatattggagacactga

SEQ ID NO: 18406 - DNA, 496 bp, Arabidopsis thaliana
  unsure at all n locations
  Clone ID: LIB35-014-Q1-E1-A12
aattttcntcgccgggtctaccggtcangtcatcccgggtcgacccacgcgtccgcacaaacgtccgtacggctgaagacgacagaagggtacggctgcgaggagacgacagaagggtacggctgcgagaagacgacagaagggtacggctgcgagaagacgacagaaggggtaaacggaagaatcgaagatagaaacgacaacaaggcagtttcttgtctcaattggctggattcgcagccggaaaagagtgttgtgtttctctgttttggaagcttaggtttgttctcaaaagaacaggtgatagagattgctgttggtttagagaaaagtgggcagagattcttgtgggtggtccgtaatccacccgagttagaaaagacagaactggatttgaaatcactcttaccagaaggattcttaagccgaaccgangacaaaggggatggtcgtgaaatcatgggctccgcaagttccggttctgaatcataaanca

SEQ ID NO: 18407 - DNA, 415 bp, Arabidopsis thaliana
  unsure at all n locations
  Clone ID: LIB35-014-Q1-E1-A7
gggtcgcagtgaccaggcccgggcgactgtttaccaaaaacacaggtctccgcaaagtcgtaagaccatgtatgggggctgacgcctgcccagtgccggaaggttaaggaagttggtgacctgatgacaggggagccggcgaccgaagccccggtgaacggcggccgtaacaataacggtcctaaggtagcgaaattccttgtcgggtaagttccgacccgcacgaaaggcgtaacgatctgggcactgtctcggagagaggctctgtgaaatagacatgtctgtgaanatgcggactacctgcacctgtaccagaaagaccctatgaancttcactgttcctgggaatggcttttggcttttcctnccgcagcntnagtggnaagncaaaaaacggccccctccggggggggnt

SEQ ID NO: 18408 - DNA, 495 bp, Arabidopsis thaliana
  unsure at all n locations
  Clone ID: LIB35-014-Q1-E1-B12
aattttcttgccgggtctaccggtcaagtgatcccgggtcgacccacgcgtccgcncaaacgtccgcccacgcgtccgtacggctgcgagaagacgacagaagggtttcgagcaaaatttctgagcaacggcgacgatgggagacaccgccttggagaagacagcggaagagctacggcatgagatcgatgagcttcaccgtcaacagcgtgagattacggagaggcttcgtgaccctcgtggactccgccgtggaggcttctcaaacgtcgctcctcgcaaccaaggccgtagaggctttcctcgacctgcggagaggaatgacgtagaagacgagcctcctgctaaaaggagattgtcttccgccgttgttaaggtcgacggtgaagatgttagtaaagatggagaatttccagttgatggtaatggaacccangttaaagttggtgagaatgggacttctgatnaaagtgacaaagaaacaatctggtcctc

SEQ ID NO: 18409 - DNA, 404 bp, Arabidopsis thaliana
  unsure at all n locations
  Clone ID: LIB35-014-Q1-E1-C12
gacagaaggggaaaatagcgtcttttttttttcttccaacctctctgtctctctccccaattcccagattctcatttttgcagagattttaggaggaacatgattgtttgaattgggagagacattggttcgtgtaaaatgcgggtgcttggtttgagctcaagcttatgctctggtgaggataaggaagaagaagagattaatggagaaggctctctcacgcctgtttatctcaacgtctatgatctaactcctgtcaacaattatctctattggttcggccttggcatatttcactctggcattgaggctcatggtttcgaatatggatatggagctcatgagtattcngagcantggggtatttgaggttgaanctaaggagctgtccangtttcatcttt

SEQ ID NO: 18410 - DNA, 412 bp, Arabidopsis thaliana
  Clone ID: LIB35-014-Q1-E1-D10
caacacaaaaaaaaagtgttaagagatccttctccctcttcgaagatgagcggtacggtgaaggatatcgtttcaaaggcggagcttgataacttgcgccagagcggcgcaccagtcgtgcttcacttctgggcttcttggtgtgatgcttcgaagcagatggatcaagttttctctcatctcgctactgatttccttcgtgctcacttctttagggttgaagctgaggaacatcctgagatatctgaggcttactctgttgctgctgtgccttatttcgtcttcttcaaggatggtaaaactgtggatacacttgagggtgcagatccatcaagtttagctaataaggttggcaaagttgctgggttctagtacttctgcggagcctgctgctcctgcaaagcttaaggtt

SEQ ID NO: 18411 - DNA, 459 bp, Arabidopsis thaliana
  unsure at all n locations
  Clone ID: LIB35-011-Q1-E1-E7
gcgtccgtacggctgcgagaagacgacagaaggggatcatctccacacaaaaaaaaaaaaaaatgaacaacttaattagctctctcgaactcacatctcttacacttgaagacccatggcctgctttctagcctaaatttcctcgagaaaacaagcaaaaaaacacaagaaagctagaatcttattttcttcttggtctttcttggtttcttcaactttttcttaaaaacgttttcaaaaaatcatggggaaccggagaaaaaaccctgaagaacttccaattacatcgcaaacaatcagtcnaagtcnaagatgttccaaaagggtgtttaaccattaaagtgggatngcaagggagaagagcaacagaganttaaccttcctggtttgnatttaancatccaatggtcaagcaactcccgaaaagaaaccnaagaccaatttgggatccatttaaaa

SEQ ID NO: 18412 - DNA, 457 bp, Arabidopsis thaliana
  unsure at all n locations
  Clone ID: LIB35-011-Q1-E1-E9
agaagggggagaagagatcgagagaagaatagtttgatcatcttgtgggaaaaataatggctgcttcantgatgctatcttcggtgacattgaaaccagctggtttcacggtgganaagacggcggctanaggattaccgtcgctcacaagagctcgtccctccttcaaaattgtcnccagtggcgtcaanaatatcaagaccgacaagcccttcggaattaacngcagcatggacttganggacngcgtctacgcctccggcataaagggcatgggatacggtgtttacaantacgtcgacaantatggagctaacgtcnatggatacagtcctatttacaacgagaacgagtggtcagccaatggtgaacttgtacaagggaagantcaccggantggcaaatttgggcggtaactctccgccngnaattcttgccggangtgcccttcttgtgt

SEQ ID NO: 18413 - DNA, 517 bp, Arabidopsis thaliana
  unsure at all n locations
  Clone ID: LIB35-011-Q1-E1-E4
ntgtcttttgggtcgcccggtccggaccataacggggtcgacccacgcgtccgcccaancgtccgtacggctgcagaagacgacagaagggtacggctgcgagaagacgacagaagggtacggctgcgagaagacgacaaaagggtacggctgcaagaagacgacagaaggggttcactnnnnnnnnnnnnnnnnnnnnnnnnnnnnnngcggccgctctanaggatncaagcttacgtacgcgtncatgcgaacttaataactccttcaatatgtcacctaatttcatttaacnggccntcgtttnanaacttcttaactggaaaaaccctggcnttaccnaacttaatccccttgcagnaaatccccctttcgccanctggcttatnaccaaaaagnccncaacnatttccccttcccaaaattttccnancctgantggcaaattggaaccccccttttaccggggcatttaanccccggcgggnttttgtggnttaccccccaaccttaaccg

SEQ ID NO: 18414 - DNA, 494 bp, Arabidopsis thaliana
  unsure at all n locations
  Clone ID: LIB35-011-Q1-E1-F11
cggggtcggcccacgnttccgtangaagcgaggacgacanangggggncgacnttttttctcncacttacccaagaaaagcttttttcgcgttttccaccggnaaccaccgtcaccttnaaccgccggngccgccgcaaggaaggctcatcatccgccgtggcaattttttgaggtgtacaangcattgcctatttgangaaccaggaaatggttaaaaggcatggatagttttgntttacaagatatatcangtcgcantgcatagacggtttcaagcatgtatgctcctcttttttccggtgttttgatatcgatatttacagacaatctgggaggccttggtgaccctgaacttcttgcgaganagacagtttttagcgtgagtgaaatanaggctcnctatgagctgtttaanaaaatcagcagtgctgtgantgatgatgggctaataaacaaggaaaaanttcagttanccttgttcaagacaaataa

SEQ ID NO: 18415 - DNA, 518 bp, Arabidopsis thaliana
  unsure at all n locations
  Clone ID: LIB35-011-Q1-E1-F12
tngcccgcccgtccggaaatcaagggtcgacccacgcgtccgtacggctggaagacgacagaaggggaaggcatgaaagaggcaactaatggctatgatgagagcagaatcttgggccagggaggtcaaggaacagtctacaaagggatattgccggacaacactatcgttgctataaagaaagctcggcttgcagacagtagacaagtagatcagttcatccacgaagtgctcgtgctttcacaaattaaccacaggaacgtggtcaagatcttgggttgctgtctagagactgaagtccccttgttggtctatgaattcattaccaatggcacccttttcgatcacttgcacggttccatttttgattcttctcttacatgggaacaccgcctcagaatagcgatagaagtcgctggaactcttgcttatcttcactcctctgcttctattccaatcatccatcgcgatatcaaaactgcaaatattctcctggatgaaaacttaactgcaaaant

SEQ ID NO: 18416 - DNA, 504 bp, Arabidopsis thaliana
  unsure at all n locations
  Clone ID: LIB35-011-Q1-E1-F4
gtcnttttggcacgcccggtccgggacatnacgggtcggnccaacccttcgntncnntgnangangacgacagaagggggacatggtggaatgtatanccgttatgatggaatttcattaccgtgggatgaacacgccgtgacttcttgtaccggaggactgggtaaccgaagcacaggggataatttcaatggagttccaaatgttgatcacactcagcattttgttaggaaagatataattggatggcttcgttggttacgcaacaccgtcgggtttcaagatttccgttttgactttgctangggttattcagcagactatgcgaaggaatacattggcgcagcgaaaccattattctcggttggngaatgttgggattcttgcaattacaatggccatggtctanactataatcaagatagccatagacagcgtataatcagttggatcatgcgacgggacanatttctgctgcatttnacntcacaactaaaggaaatc

SEQ ID NO: 18417 - DNA, 414 bp, Arabidopsis thaliana
  unsure at all n locations
  Clone ID: LIB35-011-Q1-E1-F6
cactttagcacggtgcgacaagatggcgagctcagtgacgctgcttctatggagtcttcttcttctcggtacactaagcgctattcaggccaaaaagtctaaggaaaacttaaaggagatcacacacaaggtttattttgatgttgaaattgatgggaaagcagctggtcgtattgtcatgggtctatttgacaagacagtccccaaaactgtagagaatttccgagctttatgcactggggagaaaggaatangtaagaatgggaangcgctccattacaaggggaattcatttcatangatcataccaagctttatgctccaaggangcgattttacacatggaaatggaatggggaagagaatctatctaaggtganaaatttgctgatgagaacttcaaactcaancatt

SEQ ID NO: 18418 - DNA, 425 bp, Arabidopsis thaliana
  unsure at all n locations
  Clone ID: LIB35-011-Q1-E1-F8
aagacnacagaagggtacggctgcgagaagacgacagaagggtacggctgcgaaagacgacagaanggggacgagaaaatccagatcgggaatcaacttagagaagaagaaaattaananagagaacttctaaagatgaatttggggttcttagttggagttttcggcgttcttattctttctcatgccgcttattcaacaatccantatanaggattgttgangattatggaggaagagttttctcgaccaccgattaatgttattctggagttgatcattggactagctctgtgtatgtgggttgctttgactttccctggcaaatttctctcgattcatccggattctgatgaaaacagggcggtgttttaccanataantcggattcatgatattcaatcaccgtnacagactgttccaac

SEQ ID NO: 18419 - DNA, 509 bp, Arabidopsis thaliana
  unsure at all n locations
  Clone ID: LIB35-011-Q1-E1-F9
aactggtttgcttgcgcctaccngtccggaaatccaggggtcgacccacgcgtccgtacggctgcgagaagacgacagaagggggtcggagattaccaacaagagctctctccaatcgtcgtctctttgatatatggcgtctcagcctgcaggtggcagtcctcctaaaccttgggaaaaagaaggaaatacatctggtcctaatcctttcaggcctccttctaatactagcacggctggttcagttgaggcttctggcacagctaatcctggtgaagtanttcctccgcccgtgaacaggcctaatacagctgctaatatgaattcactcagtaggcctgtaccggctagaccttgggaacagcataattatgggagcactatgggggggaggttatggttcaaatctaagtatgacctctgggtatgggtcangtacatatggttcaacattaagtggggtatggttcancatatggtggtgggatgtatggaagtaataacatgtn

SEQ ID NO: 18420 - DNA, 496 bp, Arabidopsis thaliana
  unsure at all n locations
  Clone ID: LIB35-011-Q1-E1-G2
cccggtccggacatnacgggtcgaccnacgcgtccgtacggctgcgagaagacgacagaaggggcgaccccaggtcaggcgggattacccgctgagtttaagcatatcaataagcggaggaaaagaaaccgctagttctcaaaaacaaatccccaagatggcatgagcagttgcagtgctggtgcctcaacttcaagggaagagtgactgtggcttcagttaagaatttccagcttgttgcagagattgacgcttctttggatgcgccgcctgaagaacatgagagggtgatcttacagtttggcaaaatcggtaaggatattttcaccatggattatcgctaccctctatctgcttttcaagcctttgctatatgcattaacaacnttgacaccaaaccnggcatgttgaanggtaaacctttaacccaccgagtttaatccatcccctgcaaatccatccatanaaangggntttccaaaccttaagggtttna

SEQ ID NO: 18421 - DNA, 510 bp, Arabidopsis thaliana
  unsure at all n locations
  Clone ID: LIB35-011-Q1-E1-G4
agnaatttgtctgcccgctctntcggganataangggtcgacccaccccttcnttacggctgcaagacgacagaaggggggggtcgcagtgaccaggcccgggcgactgtttaccaaaaacacaggtctccgcaaagtcgtaagaccatgtatgggggctgacgcctgcccagtgccggaaggttaaggaagttggtgacctgatgacangggagtcggcgaccgaagccccggtgaacggcggccgtaactataacggtcctaaggtancgaaattccttgtcgggtaagttccgacccgcacgaaaggcgtaacgatctgggcactgtctcggagagaagctcggtgaaatagacatgtctgtgaagatgcngactaactgcanctggacagaaaagacctatgaagagatttggggggacgtccaagttgcattaagccgtgcntacaattcctgtgtcataataatttgaacatgctctaactgttancgtttgatgaatgacaaa

SEQ ID NO: 18422 - DNA, 415 bp, Arabidopsis thaliana
  unsure at all n locations
  Clone ID: LIB35-011-Q1-E1-G5
aatttgcancagagattcgagatccggcaaagaaaggatccaggatttggttaggcacttttgagagtgatattgatgctgcaagggcttacgactatgcagcttttaagctcaggggaagaaaagctgttctcaactttcctttggatgccggaaagtatgatgctccggtcaattcatgccgaaaaaggangagaaccgatgtaccacagcctcaangaacaacaacaagtacttcatcattgtcatcaaactaatgggggaatagtgatgtttaattagtatatatangttaatatcttaagtatgtgaaacgtcatgtatagagccaagaacctgttagactaatgtactgaaaagaactcttgcaaaatatgtactgaagaattcctgtaacaatggaacttttgcnttt

SEQ ID NO: 18423 - DNA, 507 bp, Arabidopsis thaliana
  unsure at all n locations
  Clone ID: LIB35-011-Q1-E1-G6
gtcngttggccgctctaccggtcanganttcccgggtcgacccacgcgtccgtacggctgcgagaagacgacacaaggggtacaacaccatggaagtttcactaagcaactgaggcattacatttctgagttcgatcccaanatattgcggagatgcgcaaaaccaaggtcacatgaagcaaaaatcctgatagaaaagcagagtttagctctttttggtcctgaggaaagcagcaaagagagcattgtgacatcgttttctagcctgaagaggttgcttcttgaggctgtggcgtttggtacgtttctatgggacgcagangagtatgtagatggcgcgtttaagctcaangagaatgangatgcagatgaagaaacaaatancaattgtttgaagtatgtatgaaccagtttgcctagaanaaaacttgaatatcctttttggtggacattgcatataatatatagattaaatcagggtcaatngccatatgaaantaatttttg

SEQ ID NO: 18424 - DNA, 432 bp, Arabidopsis thaliana
  unsure at all n locations
  Clone ID: LIB35-011-Q1-E1-H1
gacgacagaagggatggatgagctgatcaagtcaatctctctgatagctaagaactttgcttatgtccccatgctttcacgaactcatgggcagccagctacgccaacaactttggggaaagaaatggcgaattttgctgtgaggttaagcgaagaaaggagatatctttcagaaactaagattaaggggaaatttgcaggtgctgttgggaactacaacgcccatatttccgcatattcgaatattgactggcctcatgtttccgaggagtttgttacttctcntggattaacattcaacccatacgtgactcagattgaacctcatgactatatggctagactttttaataatatcaagccagttcaacactattttaattgaatttgacagagatatatggagctacatatctccanggtacttaaaca

SEQ ID NO: 18425 - DNA, 502 bp, Arabidopsis thaliana
  unsure at all n locations
  Clone ID: LIB35-011-Q1-E1-C1
gaatttgtctggctcgcccggtccgganatnangggtcgacccacgcgtccgtacggctggagaagacgacagaagggggagtttgatgcagacatgctcaagatacgtaatgagtctgcaatcagtgctttatatggggatctcccgaggcaatgcacaacctgtggtctacgcttcaagtgccaagaagagcacagtaagcacatggattggcatgtaaccaagaacggggtgtccaagaaccataagcagaacccttctcggaaatggtttgtaagtgctagcatgtggctcagtggtgcagaagcacttggagctgaagcagtaccagggttcttgcccacggagccaacaacagaaaagaaggatgacgaagatatggcagttcctgcagatgaagaccaaacttcatgtgcattatgtggtgaaccatttgaagacttttatagtgatgaaaccgaaggaatggatgtcaaaggtccgggtatacatgaatgctcc

SEQ ID NO: 18426 - DNA, 530 bp, Arabidopsis thaliana
  unsure at all n locations
  Clone ID: LIB35-011-Q1-E1-C10
antggtctgcttgcgcccgccggtccgggaaatcaagggncgacccacccgtccgtacggctgcgagaagacgacagaagggggctaactcccaaaaaaaaaaatggnggcgtttttgcaaacgaacatcagtctgaatgcgatcaagatcgtcccggggaaatacagttctctcaccgatcatcagtttcgtgcgccgtatcgaattaggtgcgccgccgcttcacctgggaaaaaacggtataacatcgctctgcttcccggagacggtatcggtccagaagttatctctgttgctaagaatgtgcttcagaaagctggatctctcgaaggactggagtttgatttcaaggagatgcctgtcggaggagcagccttggntttggttggagttccattgccggaggaaactttcacggctgcaaaactatctgatgccaatcttcttggagctattgggagggtacaaatgggacaagaatgagaaaacatctgagacctgagatggcnctgttttaccttaaaagaga

SEQ ID NO: 18427 - DNA, 525 bp, Arabidopsis thaliana
  unsure at all n locations
  Clone ID: LIB35-011-Q1-E1-C11
gtctcttgcgcncgccgtccggaaaatcaagggtcgacccacccgtccgtacggatgcgagaagacgacagaaggggataacggagatctgcanngtagaaatancgaaggagagaaagagantgcatagtcgtgcatgtcgatggcgatnaaagcnggaaangtgttnagaacggnnactgctgctgcnaggaagttccaacagaaacanttctcagcctcatcttcggcgtttccagagccaccaccggtgtctccatcttccggtgtangagcatttctgggtattcccaagattattcgctcggaatccgatttattactctccaagtacatcannattgcccanggtcnattgactaagaanggtgattacacagaggagaagctanataaaatgttgtctggtgaagacagggtatggatcggtgagaccatnaagttactcgatggtcncaacactggactagtatcntctaaaaaaccaaactccggtcgattcaaaaagtgattcctctgtttcca

SEQ ID NO: 18428 - DNA, 453 bp, Arabidopsis thaliana
  unsure at all n locations
  Clone ID: LIB35-011-Q1-E1-C3
gcgtccgtacagctgcgagaagacgacagaagggggagataattcatttggaattctctttaaaagtttagtgatcggaggcttctcgattttctctctcttctctcacttgaatttttcagagaaagaaaaagcgattcatgacaagactccgtccaacatcgttcggcttctttaacgacgatggttggttcgtttccagcatcaattggcttctttagtggtggtggctggcttttgtatccggacgtggtccggctttgccgtcttatctcgccgtctgatcgttgctgttctggagaaatttagatcaaatataaactctggatattgtggagcanagagtcagatttacaagcgtgatgagattgtcgtanaggaaatggtgggttatccggattgatggtggtgctgggagataacgatgaaacaatcatcggcgttagaaaaaaa

SEQ ID NO: 18429 - DNA, 425 bp, Arabidopsis thaliana
  unsure at all n locations
  Clone ID: LIB35-011-Q1-E1-B7
agaagggatgccacaactgcatcaaacgccgaanaaagcanttggggtacctattgccctggagaggaacccagtcctccaccggagtatgaaacttgtttaggtgacttgtacagtgttgcttggatggaagatagtggtatgcacaatttacagactganactctgcaccancantatgaacttgtgaaaaggatgactgcacctgttgggtactcttatggttctcatgtcatgcaatatggcgatgtangaattagcaaggataatctcgatctttatatgggaacaaaccctgccaatgacaattttacctttgcggatgcnanttcactaaagccancttcaagagttacanaccaacgtgatgcatatcttgtncatttttgggaaaatnccgaatngcaccanaaggttcaacaaga

SEQ ID NO: 18430 - DNA, 439 bp, Arabidopsis thaliana
  unsure at all n locations
  Clone ID: LIB35-011-Q1-E1-C4
gcgtccgtacggctggagaagacgacagaagggggaggaacagttcagacaagtgttaacaacgtaatagatgaggttcttggaacttgtgagatttttgaggaaaaacaagttggtggggagagatttaatatattcagtggttgcccttcaggacgaacagcaactattgttctccgtggtggagctgatcagttcatcgaagaagctgagcggagtttacatgatgcgattatgattgtgagaagagctgtgaagaactcaactgttgttcctggaggtggagctatagatatggagataagcaagtacctgaggcagcattcaggaacaattgctgggaaatcacagcttttcatcaactcttatgccaaaggctccaaaaggttattccacgacantccatgttaataaaggctggatttgatgcaacctgacn

SEQ ID NO: 18431 - DNA, 454 bp, Arabidopsis thaliana
  unsure at all n locations
  Clone ID: LIB35-011-Q1-E1-C6
ggctgcgagaagacgccagaaggggagaaaaagagagatggctgaagcagcgagaagacaangtggtgggagaccattaccgccacctccgagaggcgttaaccaacaacctcctcgccctaaacctgaacctgtcgatcgtgaaaagacatgtcnccttcttcttcgtgttttcaccaanaagtggtggtcatcatactaagtgaagantatgctgtgagaggcaaagaaccaaaggatgaagttcaaatctacacttggaaagatgccaatcttcgcgaagctaacangtttggttaaaagaagtttctgttancanctaaggagaaaggaatgcctaaaattgtccttttgccgttttgtttatccctaaacaaataaaanggttggctataaatgtnaagaanaaggtttgggggaaaacgaatnggctttatccaaaanccgaaaaaac

SEQ ID NO: 18432 - DNA, 454 bp, Arabidopsis thaliana
  unsure at all n locations
  Clone ID: LIB35-011-Q1-E1-C7
gcgtccgtacggctgcgagaagacgacagaagggggaggcatcttcgtttgatacaaggcgaaatcgannnnnnnnnnnnnnnnnnnnnnnnnnnnnnnnnnnnnnnnnnnnnnnnnnnnngaaaccatttgatcgatctctcaggttacttagaatggcacaagaagccgatgggatcagattggaccaaagacatgggaaggctcgagtgagagttggaagagtttggcgtcatgctcatgatggatctcatcactttgttgaatggaatgttagcatcagtcttctctctcactgtctctcttcttaccgtcttgatgataactctgatattgtcgccacagataccattaataacactgtttatgtgaaagccaangaatgtgganatcggctctccgtggangaanttgccatactttattgggaaaacactttgctcattttaaccac

SEQ ID NO: 18433 - DNA, 425 bp, Arabidopsis thaliana
  unsure at all n locations
  Clone ID: LIB35-011-Q1-E1-C8
ggctgcgnnnnnnnnnnnnnnnnnnnnnnnnnnnnnnnnnnnnnnnnnnnnnnnnnnnnnnnnnnnnnnnnnnnnnnnnnnnnnnnnnnnnnnnnnnnnnnnnnnnnnnnnnctattcttacgctttcttcgatcgtcgatttgattttttcccttccttcttatttttctcggttgaagtanaagataaagcatcgatacatgatggctgattgataagagttttctccggagaggttcggagtttttttttagaaaggaaacattaaaaaanatggcagtctcttttcctcgtcttccgangtggttgtgtggtggtagtaacactaaagatagagaagaaagaaagagtcaattcctaaangatctcctcaacttaatccntcactgaaagaagactactactantaagactgggtcctccc

SEQ ID NO: 18434 - DNA, 432 bp, Arabidopsis thaliana
  unsure at all n locations
  Clone ID: LIB35-011-Q1-E1-D2
aagacgacagaaggggacctcannnaaancatcgaaatcttanagaanaananaanaanaagaagagaaatgacagagaagaaagagatggaagtggtgaaagggctcaacgtggagagatacatgggccgttggtacgagattgcttctttcccatcanggtttcagccaaagaacggcgtcnacactcgcgccacctacacccttaaccccgacggtaccatacacgtcttgaacgaaacgtggagcaacnggaagaggggttttatcgaatgcagcgcctataacgccgattctaaangcgacgaagccaatctcaangtcnagttctatgtccctcctttcntcccaatcattcccgtcaccggagactactgggtgctctacatccgattctgactaccaacangctctcaatgggcatcccttcaa

SEQ ID NO: 18435 - DNA, 494 bp, Arabidopsis thaliana
  unsure at all n locations
  Clone ID: LIB35-011-Q1-E1-D3
antgtcttttggttcgccggtccggagntaacgggtcgacccacgcgtccgcccaaacgtccgcccacgcgtccgtacggctgcaagacgacagaaggggggtcagatcacgagagacgattgtgcctactatctctacgcgtgaaacgcacgctccgccaagcagagagaaagagttggattctgtaggtgactgtgtcaggcgttggatgtcacgcgccacgagttttgcgtgtgtgctttggagggatcgatccatggctgggactggagagaagacaaaagatgaacattagcataacaatgaatattagggcaggaaatcgaagtactagaaagctatattgcgggcaagcgatattagggaattgctgatttttttctaataaaaaatcggatgatgaaaatatattctataacttaattgtaaagcatacgtactcaagattaaaaacncntgtnnncnaaanaaaaaaaacgggcgctccanaaga

SEQ ID NO: 18436 - DNA, 460 bp, Arabidopsis thaliana
  unsure at all n locations
  Clone ID: LIB35-011-Q1-E1-D5
gcgtccgtacggctgcgagaagacacagaagggtacggctgcnagaagacgacagaagggtacggctgcganaagacgacagaaggggcttcttcacaggatcagcaatgaatatagcttcgaggattcgacgaagttttttaagagagaagaaggaatcttcagatgggaatagcttgaataatggatcgagtgttaaggaagaaggtaaagatgagattttgggagttactgatgagttaatcgatcatgtcagatccttcaccattgatacgtttaagaacttctctctggaagatgaagaagaagaagtatctgtgaatcctttgggagatgaagataatggaatgagttcatctgcaaatgtgaagaaggattttgtctgattggcangagaaacacgccggttctccgtgttatccgaaatccnaaggaactctcacagtttgagantcaagtt

SEQ ID NO: 18437 - DNA, 456 bp, Arabidopsis thaliana
  unsure at all n locations
  Clone ID: LIB35-011-Q1-E1-D8
gcgtccgtacggctgcgagaagacgacagaaggggagaacgtgtaacacttttgtatatgtagataatagtagaacgaaaaaaaactctttgtagagagattctgcttctatatggctttctcttacgcatcattctctatacccttcaatggtttcgctgcaaatccgtctccgattacttccgcttttctcggcccatcattgagattctccaccagaacatcaaaaactcggaatccgagtaatggggtttcagtgaaatcgtcaaatagtcataggtttctagtcaaatctaaaaatttcagtgtctatgcaanggctgcagcagagaagtctgttcacgatttcactgtaaaggacatcgatggtaatgatgtttctctggacaaattcaaaggaaaacctttgttgatcgttaacgttgcgtcaagatgtggtttgacatcatcaaatta

SEQ ID NO: 18438 - DNA, 526 bp, Arabidopsis thaliana
  unsure at all n locations
  Clone ID: LIB35-011-Q1-E1-E10
acggttgcttcgccgccgtccggaaatcaagggtcgacccacgcgtccgcccacncgtccgtacggctgcgagaaacgacagaangggaagaaggatctggttatcgaaagccacgacgcggcgtttaaagtcaaagccggtgaaatgctttacggttatcaaccgttggcgacgagagatccgaagatttttgatcgggcggatgagtttgtgccggagagattcgtcggggaagaangagagaagcttttgaggcatgtgttgtggtcgaatggaccggagacggagactccgacggtggggaataaacaatgcgccggtaaggattttgttgttttggtggcgangttgtttgtgattgagattttccggcgatatgattcgtttgatattgaggttggtacgtcnccgttaggaagctccgttaatttctcgtcgttaangaaagctagcttttacgagccaagggtaaatttgtaattgtatatgttcgcanctgtgtagtccatccgttttcctgttcca

SEQ ID NO: 18439 - DNA, 493 bp, Arabidopsis thaliana
  unsure at all n locations
  Clone ID: LIB35-010-Q1-E1-G4
cggtccgganaatacgggtcgacncncgcgtccgctgcaaaaagacgacagaagggaattcataaaagaggaaattcagaggattaaggcgaataatccagacataagccacagagaagcattcagcactgctgccaagaattgggcacactttcctcatattcactttggtctaatgctggagagtaacaagcaagctaagatagcctaataattctcgagattaatggtaatataagtgttggagacttcgaagtaacaagagctgagaaggcaactatatgtattgtatgatctttggaaccgtatgtatgtaagtgaagatgtctatctttaaaaccatctatagttataatttagtaaaagcttcttttaatttaattctatggcccttgttgtatggttcgtctcacaagatttatgagttccttcggatatatgaatnctaaattaaaaatatgttatcctatattatggtaaacctatcctatac

SEQ ID NO: 18440 - DNA, 508 bp, Arabidopsis thaliana
  unsure at all n locations
  Clone ID: LIB35-010-Q1-E1-G5
aacnttctgcggcggtctaccggtccaaganatcccgggtcgacccacgcgtccgtacggctgcgagaagacgacagaaggggggagaaaaggagatggaaagaaaaaagttttcttcaaaatttattcatttgctcattgtgtttttgcttctttgtacgtttctttctcgtaccgaatctgctcttccttatcaccatgaactgttcttggggaggaagcggatgaattattataagcccaacagtgccataggaacaccatcatcaactagtgaccacgctccaggcagtaatgggaggaagttgatgagtatatatagacccaatggagacatatttacaggaccatcaggcagtgggcatggtgggggtcgcactccagccccctagtatatatatattaatgtgtaatcaaggactcacaggcgaagcttttaattctcgatcacgtataacgtatgcgttggtgtantatagtttaattccgtttcacaagccaagttttt

SEQ ID NO: 18441 - DNA, 471 bp, Arabidopsis thaliana
  unsure at all n locations
  Clone ID: LIB35-010-Q1-E1-G8
ctatggtcaaacntcccgggtcgacccacgcgtccgcacaancgtccgcccacgcgtccgtacggctnnnnnnnnnnnnnnnnnnnnnnnnnnnnnnnnnnnnnnnnnnnnnnnnnnnnnnnnnnnnnnnnnnnnnnnnnnnnnnnnnnnnnnnnnnnnnnnnnnnaaggaaacttgacagtaatgaaacttccggtgttaccaactaaacccaacactcacagccactctatgtcatcaccaattcacagttccatatcagcttcagttccctttagctgggaagaagagcctggcaagcccaagcaacactctacntcttccntcntnctcttcctctcctcaacatttaacttcttagtcctcanctcctttgaactcacaagtccttaaangctntcaccaagggttcacttacttgaaaaanntgggggatnagtnaccaaaactnaatccgcctataanaatcct

SEQ ID NO: 18442 - DNA, 511 bp, Arabidopsis thaliana
  unsure at all n locations
  Clone ID: LIB35-010-Q1-E1-H1
gtttttttgggcngccccggtccggaaatanangggtcgacccacncgtccgtacgggaaaagacgacagaagggagaaggaccaatctataatagctgaaattagattcaaccatgatcatgaatgggtgatgagcaaatatagagaagtcattgagttctggagaaatgaacgagaagctgggtacactcctgaagaagaacgttggaaatgtcggtattgccaatttgctaagtcttgccctggaaacccgagtttcgaatctcctagcacaagctcaccaacaagagaggctcctcctttaccaagctaaaaagaagatgaaaagttgatcctttcaccgaaagctgctaaatgctaacatatatgtttgtgttgtctttaatttccacatttgtttcccttaaattgcatagcagttaagtgattaaaccgtggtttgattagggttggttaagcgtancaagattganttgtcccgggatnccccaatttgataatgtgtatccg

SEQ ID NO: 18443 - DNA, 495 bp, Arabidopsis thaliana
  unsure at all n locations
  Clone ID: LIB35-010-Q1-E1-G2
gtccgganattacgggtcgacngncncgtccgcccaancanccgtactgcgagaagacgacagaaggggggagaagtagaaatcgataaaggcgaagaaggaatcgcaaggaaggaatnnntctgagaggaagatcatgatcctagctgtgttgttcgccaattccgttgggaatgttttaatcgaaaggttcaatggagtaccagctgaggaacggctccgctggcgatctttcttggttaagttgggagcagataatctcaaaggcgttaaaaatgaggagcttctcgttgcttgccacaagtcggtttatatcgtgtacacaatgctaggggatgttagcatcttccttgttggcaaagacgagtatgatgaacttgctttggcagaaaccatctatatcataacagcggctgtgaaagacgtatgtggaaagccgcctacaaganccgagtgtttttggataaatatggaaaggatttgcttgtgccttga

SEQ ID NO: 18444 - DNA, 491 bp, Arabidopsis thaliana
  unsure at all n locations
  Clone ID: LIB35-010-Q1-E1-H2
ggtccgganaaacgggtcgacccacgcgtccgtacagctncgacgacagaagggggcttcttatttgctctgatcttttgattcaacggctcccggagacgacggaagcaatgcagttcttcggtggatctgagattagtccgtcgccgccagttccgacggcgagtggaaacaacgcgcacatgatgtacgttttcaatcgtaacggtgtatgtcttcnctacaaagaatggaatcggcctcttcatacacttaatcctcagcaagatcacaagctcatgtttggtcttctcttctctctcaaatctctcaccgctaagatggatccaagtcaatgcggataaaggaaatcttggggttccacagttgccangacaaggttgctctttccataagtttccgtacgaatacttacaagctaagtttcatggagactccctctggtattaagattatccttagtanctcatccaaagaaccggaganttacg

SEQ ID NO: 18445 - DNA, 504 bp, Arabidopsis thaliana
  unsure at all n locations
  Clone ID: LIB35-010-Q1-E1-H3
tctttggngcccggtccgganaaacgggtcgnccacgcgtccgcccaaacatccgtacggctgcgagaagacgacagaaggatacggctgcgagaagacgacagaagtagaagaaaccaaagcgaaatcaaaaagctcagcaattttccagatttctctaattgacgatggcgctttgtgctactactcaaaggactatccgtatagcggcgacgctccggcgtgttgctcgacctttcgctactgacgcggtggttgagtcggattacaagcgtggtgagatcggtaaggtctccggaatcccagaggagcatctttctcgcgaggtgataatatactcacctgctagaacagctacccagtcaggatctggaaaactcggaaaatggaagattgacttcgtctccaccttaaagtgggagaatccgttgatgggatggacntctacaggtgacccctangcnaatgtttggtgactcngctcctgcctttgaatttgaaaaa

SEQ ID NO: 18446 - DNA, 425 bp, Arabidopsis thaliana
  unsure at all n locations
  Clone ID: LIB35-010-Q1-E1-H4
agaagaagaaaaaacgaaggagaagaagaacaatttcgcggattcaagagacagagagcttcttctgcgtaaagtctgatctttgaaaatgacggaagaaccagagaaggtgtcttcttcagtattacatcaaccttctggtgataagaaacctgaagatgttgggatcaaacctcaggatccagcgtcttcttctgggtttcgagcttatcctaatggtgattctccaatgtacccggttttttatccgggtcttgttcccggatccaatcctgtacagtacgaggaacaaatgaaccgtggagctgggatctatgcggttcctgttcatcaatttggaggacatgtcgctggtcttccctcaaattatcttatccctctcacttacaatgttccaacgactanaccaaataatgaagctgaga

SEQ ID NO: 18447 - DNA, 455 bp, Arabidopsis thaliana
  unsure at all n locations
  Clone ID: LIB35-011-Q1-E1-A1
gcgtccgtacnanctgcgagaaacgacagaagggggaaacaaagagattagaaactacggagagaaagagagaagatatatagccatggcaatgaagtcagtttctaccttggccgtttttgccatcctctttttggttatcgttgaaatgccagagataaaagcgcaaggtagcaagtgtctgaaagaatatggcggtaatgtgggtttcagctattgtgcgcctaggatatttccgtcattctgttatcggaactgccgtaagaataagggcgcgaagggaggtanatgccgttcgggangggcaggagctggtagtatgatatgtttatgcgactactgcagcgacaaaccttaaatcagatcgttaaacgttttaacctcaaaacgcatgagtattgcnacctgtnctaangtncaanggtttgtaacttgtgtantaataaagtgaatgg

SEQ ID NO: 18448 - DNA, 506 bp, Arabidopsis thaliana
  unsure at all n locations
  Clone ID: LIB35-011-Q1-E1-A12
ccggtccgganacaagggtcgncccacgcgtccgtacganatgcgagaagacgacagaaggggagaagaagaaaaatcgatggcggggatactagtgaacaatatcctccctcaacctccgattctccgatcgctttcttcttcttcgcgaagaagttcaattcgaaccctagttatggtcaaagcttcttcctctgaaccttccgagtctgtttcagtctccacgaagaccagtgacgacactggagctgttgttgtgttcactgctcctcctggtttcaagccaccggagccaaaacggttcgccgtcaaatccggaaaactcttcgatgtcttgggtgcagcaattggattgtttttccgattcggcactggtgttttcgtttctgggtactctgcatcttttgtgtctaaggaagagattccagctgatcagtatgcgttgcgtttangcgggattacggtaaaggaaactgctaangtccggccncgtcctgagaaaccaa

SEQ ID NO: 18449 - DNA, 493 bp, Arabidopsis thaliana
  unsure at all n locations
  Clone ID: LIB35-011-Q1-E1-A4
tggnacgcccggtccggagataacgggtcgncccacgcgtccgtncnnntngcaagaagacgacagaagggggatccattcatgctaaatggtgcttagcttaccacaaggagaactttgcttacgagcactgggatgacattctagacatctgtaaccagtatgatgtggctctttccattggagatggtctgagacctggctccatttatgatgctaacgaccctgctcagtttgcagagctccttactcaaggtgaactaactcgccgagcgtgggaaaaagatgtgcaggtgatgaatgaagggccagggcatgtcccaatgcacaagattccaagagaatatgcagaagcagttggagtggtgtaacggggcaccattctacacccttggtcctttgactactgatattgcccctggatatgatcacattacctctgccattggagctgccaatattggagccttgggtacaactcctctttgctatg

SEQ ID NO: 18450 - DNA, 441 bp, Arabidopsis thaliana
  unsure at all n locations
  Clone ID: LIB35-011-Q1-E1-A7
gcgtccganaagacnacanaagggggagtttgatgcanacatgctcaanatacgtaatgagtctgcactcagtgctttatatggggatctcccgangcantgcacaacctgtggtctacgcttcaagtgccaanangagcacagtaagcacatggattggcatgtaaccaagaacgggatgtccaagaaccataagcagaacccttctcggaantggtttgtaagtgctatcatgtggctcagtggtgcataagcacttggagctgaagcagtaccagggttcttgcccanggagccaacaccagacatganggatgacgatgatatggcacttcctgcagatcgataccaancttcatgttcattacgtggtgagccatttgatactttatntgntnaaaaccaaggaattggtnttaaaaagttccgtnaacatgaatg

SEQ ID NO: 18451 - DNA, 418 bp, Arabidopsis thaliana
  unsure at all n locations
  Clone ID: LIB35-011-Q1-E1-A8
aagacgacagaaggggatattgtcgagtccgaacatctcgtanctctccttgcanttgttccgaagtattcccaagaagactggctaccatgttatgatactttgaccgattatgtggttccnaggtcctcgaagaaattgtttgangataatgagtatgccctttacaccgtcactctctttactcgtgtcgcagataatttcatgattgctgctcgtgaaaaaggattccaagtccgtgattttgaacaaagtgttgaancacaaananactcgtaaacaaganctancaaagttggttcaagatnangaaagtttganaaagctctcttttgaatggtgctacaccaattatgganaggtttcantcctggatcaattctgtctgtgntacattcnctgatagcatttgatatac

SEQ ID NO: 18452 - DNA, 526 bp, Arabidopsis thaliana
  unsure at all n locations
  Clone ID: LIB35-011-Q1-E1-B11
ttggtntagccggccgacgggnantcaagggtcgacccacgcgtccgtacgcnagaagacgacagaagggtacggctgcgagaagacgacanaagggggttgtgttcttgaacgagagacctcagcctcgaccaggcaaaggtgtgatcaatacttgtgaagtctgttatcgaagcctcgttgattccttcagattctgctctcttggttgcaagatctctggaatatcnaagaagaagagaaaggaatggacgaacaatctttcggattctgatgattcgtatagcagtacgagtatcggaaggctcaagaagaatgatgacattatgaataatagtttcacaccatcaacaccgcctttatcaagccgtgaatcgtcgaattgcaaagcgaaggaagggaatcccgcatcgtgctcctttcggaggactaatcatanaatactaagaaatggtannnnnnnnnnnnnnnnnnnnnnnnnnnnnnnnnnnnnnnnnnnnnnnnnnnnnnnnnnnnnnnnnnnnnn

SEQ ID NO: 18453 - DNA, 499 bp, Arabidopsis thaliana
  unsure at all n locations
  Clone ID: LIB35-008-Q1-E1-H12
tttnttgcccgccgtccgganaaggaaatcccggctcgacccacgcgtcnngtgngagaagacgacagaagggggagaaacgaaaattaataanaaagagaagaaaagccaaaagcttcggtcgcgcaagatcgcttcatttgtttctagagtgattcatggattctttaaactactaataatggatttttgttgtgtcttaatgaaataatgggagcagctgaagcaagagcattgtggcaannaacagctagtcgttgctttgttgttcatgaggatgctaagatggctccgaggttagcttgttgccaacaccancaatcttcttcgggcaacaccgaaaaaaacagcttttcttccggaagttttggagattcctctgatttctcctgtgataccaaatggtggnttaaagggatnaactggttttgatgaagaagttacaaactcccttccttgaaagataccaantgcaagaaatgcattganttgtcgactt

SEQ ID NO: 18454 - DNA, 483 bp, Arabidopsis thaliana
  unsure at all n locations
  Clone ID: LIB35-008-Q1-E1-H2
gccctaccggtccgaanattcccgggnccccncgcgtccgtacggctgcgagaagacgacagaagggtacggctgcgagaagacgacagaaggggattcacgaaaacaaaccacataaactagtcaaagaagaatagatgagttacattataaaaaagttcaagtgagagaaagagaggtccaatggcggagaaagaagaggatgtgaagcttctaggtttttgggcaagcccttttactcgtagagttgagatggctttcaagctcaaaggcgtgccttacgagtacttggagcaagatatagtgaacaagagccctttgcttctccagataaatccggtttacaagaaggttccggttcttgtctacaaagggaaaatattatccgagtcacatgttgatcctcgaatacatcgaccaaatatggaagaacaatccaantcctcctcaagattcttacgagaaagccatgggctttatnct

SEQ ID NO: 18455 - DNA, 445 bp, Arabidopsis thaliana
  unsure at all n locations
  Clone ID: LIB35-008-Q1-E1-H6
gcgtccgtgcgagagacgacagaagggcagggatcagcggatgttgcttataggactccgctggcaccttatgagaaatcaaagtttttaggtttaatggggaggaggatgtggtggcggaagtggcggagatggaggagatttgccggaaaatggaagatgggcttgaggggttacagagaagagttagagaagtgtttcatangttggtgaaaagcanaagtgagatacttgaagtgattgatcactgattgtaatcttttaactttgttgttgtgaaaatttaatctttgagttaactcttttgattaagaaaagagaacaaattacaggtttttnnnnnnnnnnnnnnnnnnnnnnnnnnnnnnnnnnnnnnnnnnnnnnnnnnnnnnnnnnnnnnnnnnnnnnnnnnnnnnnnnnnnnnnnnnnnnnnnnnnnnnntgcc

SEQ ID NO: 18456 - DNA, 406 bp, Arabidopsis thaliana
  unsure at all n locations
  Clone ID: LIB35-009-Q1-E1-A11
gtatggcggagaaagctatggtggttctgagtagccttgcagcgatagatgatggcaaagaggctattgtcgaggaaggagggatcgcagcgcttgttgaggccatcgaggatggatctgtgaaagggaaagaatttgcgatcttgacgctgttgcagctttgttctgatagcgttagaaaccgtgggttgcttgtgagggaaggcgcgattcctccgcttgtgggcctctctcagagcggctccgtcagtgttagagctaagcgcaaggcagaaagacttctggggtatcttcgggagccaaggaaggaggcaagttcatcaagcccatgaaatgcaaccatgtggaggttcatcaatccaatatgtatatactgagtgtangtttggtgggttttgtaaaacnt

SEQ ID NO: 18457 - DNA, 375 bp, Arabidopsis thaliana
  unsure at all n locations
  Clone ID: LIB35-009-Q1-E1-A12
ctgcgagaagacgacagaagggtacggctgcgagaagacnacagaagggtacggctgcgagaagacgacagaagggtacggctgcgagaagacgacagaaggatacngctgcgagaagacnacagaagggtacggctgcgagaagacgacagaagggtacggctgcnagaagacgacagaagggtacggctgcgataanacgacagaangggatanaagaaagagctccgtccccaaaaacaaangaaacaaaaaatcantcggcgaaacgggaagagatctatcggaaatcttacggcggccggaagtcatggcgaacatanaatcagaagcagtcgatttcganccanaggangatgaccttatggacnaaga

SEQ ID NO: 18458 - DNA, 552 bp, Arabidopsis thaliana
  unsure at all n locations
  Clone ID: LIB35-009-Q1-E1-A4
gttgcctgcagcnacccgtccggaatccanggtcgacccacgcgtccgcccacgggtccgtacggctgcgagaagacgacagaagggtacggctgcgagaagacgacagaagggtacggctgcgagaagacgacagaaggggatgtgattgatctggaagatgactccatagacgctgaaatcctcaattccatggcagtcactaatgaacatttccacactgctctcgggaacagcaacccatctgcacttcgtgaaactgttgtggaggttcccaacgtctcttggaatgatattggaggtcttgagaatgtcaagagagagctccaggagactgttcaatacccagtcgagcacccagagaagtttgagaaattcgggatgtctccatcaaagggagtccttttctacggtcctcctggatgtgggaaaacccttttggccaaagctattgccaacgaagtgccaaagctaatttcatcagtgtcaaaggtcccgagcttctgacaatgtggnttggagaaaaatgaagcaaatgttcgtgnaaacctt

SEQ ID NO: 18459 - DNA, 497 bp, Arabidopsis thaliana
  Clone ID: LIB35-008-Q1-E1-G5
gcgtccgtacggctgcgagaagacgacagaagtagaagaaaccaaagcgaaatcaaaaagctcagcaattttccagatttctctaattgacgatggcgctttgtgctactactcaaaggactatccgtatagcggcgacgctccggcgtgttgctcgacctttcgctactgacgcggtggttgagtcggattacaagcgtggtgagatcggtaaggtctccggaatcccagaggagcatctttctcgcaaggtgataatatactcacctgctagaacagctacccagtcaggattctgggaaaactccggaaaatgggaagattaacttccgtcctcctaaccttaaaagtggggaagaatccgtttgatggggatgggacctttctaacaaggttgaactccctaatggcctaaatggttggggtgaactcctggcctcccttggcctttttggaattcctgaaaagaaaagcctgcctaaaagttcctttttggc

SEQ ID NO: 18460 - DNA, 466 bp, Arabidopsis thaliana
  unsure at all n locations
  Clone ID: LIB35-009-Q1-E1-A8
gaagggtacggctgcgagaagacgacagaagggtacggctgcgagaagacgacagaagggtacggctgcgagaagacgacagaagggtacggctgcgagaagacaacagaaggggtctagggccttgacggaagagcatgccagagacagctttgagaatcttctctttagcgtttgtcgattcagagagctcacaggctcttacccacagaatataacagtagtgagttatgattttaaggaggagagatttgcgcatttgcatcgttcagcaatgggatttccggaatcaagatttttctacttaggaacaccagcttctctatcatccaaagaagacgctctaaaaggcgaggctttggttanatnacaatttcaagaagattcatacggatgtgttggtccccttggcgttaagaanctgatcntgaccctttcataggactataccttaccctaattgggt

SEQ ID NO: 18461 - DNA, 493 bp, Arabidopsis thaliana
  unsure at all n locations
  Clone ID: LIB35-009-Q1-E1-B12
ctnagcctgccgtccggaaatcaanggtcgacccacgcgtccggcgaaaagacgacagaaggggaaattaaattcgatttttgagacaaagctcgacaagtcgtcggcggcggtgtaaaaatagtcggagctatggcgatgcaggccggagttggcttatccaggatctttctcttagccggagcaggttacactggtacgatcatgatgaagaatggaaaattgtcggatttgttgggtgaattgcagagtttggtgaagggaatggagaaatctggagaagggtctgagggagattctgatgtttctgatgctatagctgcacaggttcgccggttggctatggagattcgacagctagcttcgcagcaacacataacggtcatgaatggagtttctggtgcaaacctacaagcccttgctgttcctgctgcggcattgggaactctcggatatggttatatgttgtggaaaggacctcattcactgacct

SEQ ID NO: 18462 - DNA, 506 bp, Arabidopsis thaliana
  unsure at all n locations
  Clone ID: LIB35-009-Q1-E1-B4
ncgtccggaatccaaggtcgacccacgcgtccgtacggctgcgagaagacgacgatcgagaacaaattcaacgatgaagaaaataaggttaagataacgactaggacacgtgtccgcaagctagcttctgctcgactcaacaaacgagccatggagaggaggaactggcctaagttcggagacgcagccaatgaggaagctggtagccatctcactatggtttctaccgaagagatccttctcgaacgaccccgagctcctggtaccaaagcggatgaatcaaaggcaacaggagatggcttgtctcagctgggtaaaggtggtgcagttcttatggtgtgcaggatatgccacaagaaaggagatcactggacatcaaaatgtccatacaaggatctagctgcaccaaccgatgtcttcattgacaagccacccacaggggaatcatctaccatgtctgctgcacctggaactggcaaaggcgcctatgtcccgcctancatgag

SEQ ID NO: 18463 - DNA, 509 bp, Arabidopsis thaliana
  unsure at all n locations
  Clone ID: LIB35-009-Q1-E1-B6
cggtnaggatacccgggtcgggccacgcgtccgatgcnatgagccacactaagctcataggtttttagccacacaccagaagacgacagaagggagagagaaaattcagcatttttgatagctcaagcacttgattctttccaaaggggtttcctgagatcacaaaggccaagtaacaatggcgaaaggagttgcagttttgaacagcagtgagggtgttacggggactatctttttcacccaggaaggcgatggtgtgaccactgtgagtggaacagtttctggccttaagcctggtcttcatggtttccatgtccatgctcttggtgacaccactaacggttgcatgtctactggtccacatttcaaccccgatggtaaaacacacgggtgnccctgaggatgctaatccacatgctggngatttaggaaacatcactgttgggcgatgaatggnactggcaccttcaaanntcactgntttgccangattcctccttaccggganc

SEQ ID NO: 18464 - DNA, 533 bp, Arabidopsis thaliana
  unsure at all n locations
  Clone ID: LIB35-009-Q1-E1-B8
cggtcaggnaaacccgggtcgngccacgcgtccgtacggatgcgagaagacgacagaaggggccccgaaattttttagcaaattctctacctctatctctctcttctctgggaggaaaaatggagatatcggttgcatcggtaacaatatcagtagttctagctgttgtgtcatggtggatatggagaactttacagtgggtttggtttaagccaaagatgcttgagcattacctgagaagacaaggtcttgccggaacaccttacacgcctctagtcggcgatttgaagaagaatttcaccatgttgtcggaggcaaggtccaaacccctcaaactaacggatgacatctcacctcgtgtcgtgccttatcccttgcaaatgttcaagacttacggaaggacttactttacatggtttggacctatcccaaccatcacaataatggatcctgagcaaatcaaggaagtgttcaacaaagtttatgatttccaaaaaaaaaaagnnnnnnnaaaaaaaaaaagcgggcgctcc

SEQ ID NO: 18465 - DNA, 479 bp, Arabidopsis thaliana
  unsure at all n locations
  Clone ID: LIB35-009-Q1-E1-B9
tctccgganatcagcagtcgacccaggcgtccgtacggctgcaaagaagacgacagaaggggagagagaatcaaaacaatggccactgtgaaaatcnnnnnnnnnnnnnnnnnnnnnnnnnnnnnnnnnnnnnnnnnnnnnnnnnnnnnnnnnnnnnnnnnnnnnntcattcccaatgcggcacctgcaaaggcggtgaagttgcgattcaatggaaagtccctgagagcaaaaccaatggtatacagatcatctcgctccgttggagtcacctgctctgcttcatcttctctgacgactcttccctctgctcttctcttcgattgcgatggcgttcttgttgataccgagaaggacggtcacaggatctccttcaacgacactttcaaagagagagatttgatgttacgttggatgttgatttatacggcagttacttaaaatcggtggtggtaaanaaagatgactggctnatttta

SEQ ID NO: 18466 - DNA, 550 bp, Arabidopsis thaliana
  unsure at all n locations
  Clone ID: LIB35-009-Q1-E1-C2
acggtttcttcgcncagcctccggaaatccaaggtcgaccacgcntccgtacggntgcgagaagacgacagaagggtacggctgcgagaagacgacagaagggtacggctgcgagaagacgacagaaggaacttagcagattgtgcggtcgttgttgaggagctctggtggaggactttggaaggtgcagctttggatttgagctctgtgtctttctttggagaagaaaaacatgagaccgctgtttcgaaatgggcacgagctagaaaacgagctgctaaggttgggaaaggcttatctaaagatgaaaaggctcagaaattagctcttcagcattggcttgaagctattgacccacgtcatcgttacggccacaacttgcacttctattatgatgtctggtcagcgagcaagagcacacaaccattcttttactggttggatataagagacggcaaagatgtaaatcttgagaaacaccttagaantgttctgcaaaaacaatgcatcanatacttangancgatggngaanaaaagcatattaagtt

SEQ ID NO: 18467 - DNA, 286 bp, Arabidopsis thaliana
  unsure at all n locations
  Clone ID: LIB35-008-Q1-E1-E10
aagacgacagaagggcacancnnnnnnnnnnnnnnnnnnnnnnnnngcggccgctctagaggatccaaggcttacgtacncgtgcatgcgacgtcatagctcttctanagtgtcaccnaaattcaattcactggccgtcgttttacaacgtcgtgactgggaaanccctggcgttacccatcttaatcgccttgcagcanatccccctttcgccagctggngtantagcgaanaggcccgcaccgatcgcccttcccaanagttgcncancctgaatggcgaatgg

SEQ ID NO: 18468 - DNA, 432 bp, Arabidopsis thaliana
  unsure at all n locations
  Clone ID: LIB35-008-Q1-E1-E2
tacngnatgcgagaagacgacagaagggtacggctgcgagaagacgacagaagggtacggctgcgagaagacgacagaagggtacggctgcgagaagacgacagaagggtacggctgcgagaagacgacagaagggcgnnnnnnnnnnnnnnnnnnnnnnnnnnnnnnnnnnnnnnngcggccgctctanaggatccaagcttacgtacgcgtgcatgcgacgtcataactcttctatagtgtcacctaaattcaattcactggccgtcgttttacaacgtcntgactgggaaaaccctggcgttacccaacttaatcnccttgcagcanatccccctttcgccanctggcgtaatancnaagagggccgcaccgattgcccttcccaacaattncccaacctgaatggcgaatgggacccccctgttaccg

SEQ ID NO: 18469 - DNA, 416 bp, Arabidopsis thaliana
  Clone ID: LIB35-008-Q1-E1-D5
aagacgacagaagggcgggtgacggagaattagggttcgattccggaaggagagccaaagcttcgtcgttgatcattcctccgtagttgcggaattgaacccaacttaggaatcaaatgcccaagatctgctgctctcgttccgctacacaagttgtggtagcacaaaaatcaaactcgggtaaaggaagaaacggtgaaggaggaatcaagtatggatttagtttgataaaagggaaatctaaccattcaatggaggattatcatgttgctaagtttaccaatttcaatggcaatgaattggggctttttgcaatctttgatggtcataaaggtgatcatgttgctgcttatctgcagaaacatctcttctctaatatccttaaagatggagagttcttggttgatcctcgaaga

SEQ ID NO: 18470 - DNA, 416 bp, Arabidopsis thaliana
  Clone ID: LIB35-008-Q1-E1-E5
gacagaagggggaggacactgtgcagatcactacggctcattcacaggctgtgttttctgattcctacccgccttcgtcttgtgtgtttaaagagaatgttgttcagttcatgaagccattgttggagttttttcagcagattgggtctcctttttgtttgaatgcttacccttttttggcgtacacttataatccgaaggagattgatatcaactatgctcttttcaagccaacggaagggatatatgacccgaaaaccgatttgcattacgataacatgcttgatgctcagattgatgctgcttacatggcgttgcaagatgctgggtttaagaagatggaggttatgatcactgaaactgggtgggcttctaaaggggattcagatgaaactgcagcaacacaagagaacgca

SEQ ID NO: 18471 - DNA, 430 bp, Arabidopsis thaliana
  unsure at all n locations
  Clone ID: LIB35-008-Q1-E1-E7
ggctgcgagaagacgacagaaggggaccgaaacaagtatgttgatgactttgttctcctttaaattatcatcacttcatttctcagagatttacgcacacagagttctcttcttcgtcctagtttcttctattccaggtgagaagaaaaaatggcgtttgtgcccactgcggaagtgtgtgacgcgaatcaagagatgattcgaagtggccagctccgagctctgcaacccgtttttcagatttatggtcgtcgtcaaatattttcagggtccagtagttactggttaaagtcctttgaagacaatggcttaatcccgttaacttctccgaaaganaaaagggaaatgggtaanantccttggnggtgggtnggtggganggaanttaaccctgttgcgaatactaaggganggaaaacccggtccgtac

SEQ ID NO: 18472 - DNA, 393 bp, Arabidopsis thaliana
  unsure at all n locations
  Clone ID: LIB35-008-Q1-E1-E8
agaagaattttgactagaaagaaaaaaaatcaatttcgacggccatttttttctctcatcctttttgattcctctgtttcaccnnnnnnnnnnnnnnnnnnnnnnnnnnnnnnnnnnnagttttcacctttactctaaaagtttcactttttatgtctgctttgaagctctgagatcggagaaagcaatatctatggcggaagcaagacgattcagcccagttcatgaattagatgttggacaaatactctcagaagcacgacatcgatggcttcgtcctcctgaaatctgtgaaattttacaagaattaccaaagatttcaaatttctactgagccaactactacaccatcaagtgggtccgtttttaagtttgatcgaaangtgctcaaat

SEQ ID NO: 18473 - DNA, 453 bp, Arabidopsis thaliana
  unsure at all n locations
  Clone ID: LIB35-008-Q1-E1-F1
nggtttcctggcgcacggtccggaaaaccgggtcgacccacgcgtccgtacggatgcgagaagacgacagaaggggagacgtcgaagatgaagttcaacgttgcgaatccaactactggatgccagaagaagctcgagatcgacgatgaccagaaactacgtgcgttttacgacaagagaatctctcaagaagtcagtggagatgctttgggcgaggagttcaaaggatacgttttcaagatcaagggtggttgcgataagcaaggtttcccaatgaagcagggagttttgactccaggccgtgttcgccttctgcttcaccgaggaactccttgcttcagaggacatggaanggagaactggtgaaaaggagaaaaaaatccgtttgtggntgcattgggaanccctgatncccccgntcctgaaacctgtnaattgtaaanaaggtgaaaa

SEQ ID NO: 18474 - DNA, 410 bp, Arabidopsis thaliana
  unsure at all n locations
  Clone ID: LIB35-008-Q1-E1-F11
ggctgcgagaagacgacagaaggattaaaatgtggcttagggtgggtgcttcgcgatcatacagggaaggtgttatggttaggtgcaagagctgtggtaaaagtaagaagcgtgctggaagtagaagtggaggctcttagatgggctgtgctgtcattatcccgattcaattataggaagatcatttttgaggtggattctcagcaacttgtgtctttggttacatgaaagttatgcttgtcaagtctcaattcaattatccaagacataaagtatctacttagcaagtttgaggattttatgcttgtgcatacaagccgagaaggaaatggagtggcanatagaatagctaaggaatctctttcttttgagaattatgatctaaattgtattctattgtaccaatttgg

SEQ ID NO: 18475 - DNA, 419 bp, Arabidopsis thaliana
  unsure at all n locations
  Clone ID: LIB35-008-Q1-E1-F3
agacagaaggggaacacactcaaatatctctccaaacactaaaaataatttgtaccgactctctctctctctccgtaacaaaaaaatcaccaatggcaaaacaatatctctttgtactcctctcaatctcctatctcttatcactggagctcacggcggccaccgcagcctcacagaccggagcttccaaaaaagccataaacttcatccaatcttcttgcaaaaccaccacataccctgccttatgtgtcaactcactctccgtctacgcaaacgaacatcnaaacaagcccnaaacgtttagctgagaccggctatagcgtgacactaagccgagccaattcaacnaactcttcgtctcgcgtctaacacgtatgaagggtcttaagaagcgcgaaggtcgaaagcatcaangattg

SEQ ID NO: 18476 - DNA, 417 bp, Arabidopsis thaliana
  unsure at all n locations
  Clone ID: LIB35-008-Q1-E1-F5
aagagacagaagggaaagttgacgagaagagaaacagtacccatagaaactctgctatgtcaaaaaagtctgaaagtgcggttctccgagtatcaccttgcatggatcagaaaggagctgaggttaaagttaaaccagtggagcaaaatgataaggcaaagaaacgggaactacaagagaagaatcaccgcagggacagtgtgacaaagagtgataagccattgggtaatgaagggataaagaaaagtgaaccaaaaaacataacaaatggaagtagtaaagagaagaaagaggagaaaactgaggtgataaagaaaaatggtcaggagaaaccaaagttttgtagagggangacccagattagagagagaacaagacgttgtgggtactagggattttagagtgcaagactttcaa

SEQ ID NO: 18477 - DNA, 438 bp, Arabidopsis thaliana
  unsure at all n locations
  Clone ID: LIB35-008-Q1-E1-F6
gcgtccgtacagctgcgagaagacgacagaaggggatctaactcctatgaatgcttatggttattggcttggacttggtgtttttcattctggtgttgaagttcatggagttgaatatgcatttggagcacatgaatcatcaagtacaggtatttttgaagtggaaccaaagaagtgtcctggtttcacgtttaggaaatcgattcttgtggggaaaaccgacttggttgcgaaagaagttcgtgtttttatggagaaattagctgaagagtatcaaggaaacaagtaccatctcatcacaaggaactgcaaccatttttgcaatgaagtttgtcctaaacttgctcagaaatcaatccctaggatgggtgaatcggacttgctcgcttaaggggttctctgcaanctgtgttgttacaacctcgtttgaacgangca

SEQ ID NO: 18478 - DNA, 479 bp, Arabidopsis thaliana
  unsure at all n locations
  Clone ID: LIB35-008-Q1-E1-F9
tctgcccggcntaccggataggatatcccgggccgacccacgcgtccntacagctgcgagaagacgacagaagggtacggctgcgagaagacgacagaagggtacggctgcgagaagacgacagaaggggaagtcagtcgtaggagacctcactcacacatactttgttggaaatgctccaatggctcacatggccatacaacctacagaagaaatgcctgatttgacatcttacaagaggttcttcttcaaatgcagtgtagtancagcatcgaaatacgacataagcaactgcgaggattttgtgtgggtaaccaaagacnagctcttggaattcttccctgancaagctgaattcttcaacaagatgatcattanctgaaccactcacaccacanaaactcctattttcatcccttcctctccaacaatgtcatctctctgggattagacaatgtgagaaggtcatgtnataacca

SEQ ID NO: 18479 - DNA, 424 bp, Arabidopsis thaliana
  unsure at all n locations
  Clone ID: LIB35-008-Q1-E1-G1
agaagggggggaagttgaaaatatgaaaattgtaaatgacactgtaatgttgtgtgggaatctgaatgcagatgaagctacgcaggcgacacctgagcctaataatgcagaaccgtatccagactataacctggtggtcacagagagggaaacaatcatggaggttgatgagccggatcctgatgatcaagaaatccagaggatccaagactctgttaccatcatctctaaccgtctcaaagaaagccataaagggcttgagaaatgaagtcaaccccggtcaagcaaccactgtgttacaaatgcntctcaaaataatcaggaacatcattgaacaaccaaatgaaattaaattcaaaangctgcnttagggaaatcctgcaattaagcgcaacattctcaactttccaanctgccgttgaga

SEQ ID NO: 18480 - DNA, 501 bp, Arabidopsis thaliana
  unsure at all n locations
  Clone ID: LIB35-008-Q1-E1-G10
gtcctgtttgggtcggncctaccggattaggacatcccggnccgacccacgcgtcangaaaacgacagaagggggagaagaagaagttgaaaaaattgtaaagtcagtctctccgactcttccttccttccgtgttcaccattgctacacgttctccacgaantttccgatgcccagtcgtcggggacatanctanaccgtcggatctcctgcaaccacatcttccaattacagtaacactactttcaccgatcgttccttcccgacaacccctgcccgtacatcnaccgacacaaccacctccatcgctcgtcgcatctccggtatcttcatcaactgcttcactcctcccgattccgtttcctccaactacatcgacaattcaagagtcntcttccgtgnattatatccgttcgtaaacgtaactnatacggaagtactatgtncagngggntttatngaantcccaaccanacngtcatacaagaatcacttcgcgna

SEQ ID NO: 18481 - DNA, 444 bp, Arabidopsis thaliana
  unsure at all n locations
  Clone ID: LIB35-008-Q1-E1-G2
ntaccggtccgaacatcccggnncgccacncgtcngtacanntggagaagacgacagaagggggaaacatttgagtacacagcaattatttgcagatcccacagtgcctccataacagagtacggtggtgtaggagacggcaagacgctaaacacaaaggccttccagagcgccgttgatcatctcagccaatactcatctgaaggcggagcacagctctttgtacccgccgggaaatggctcaccggaagtttcaacctcacaagccatttcactctgtttcttcacaaagacgcaattcttctcgctgctcaagacttaaacgaatacccaattctaaaggctttgccttcgtacggacgangacgtgacgccgccggtggaagattcgctatctcatcttngcactaatcctctccgacntaattacaccggggaacaacn

SEQ ID NO: 18482 - DNA, 424 bp, Arabidopsis thaliana
  unsure at all n locations
  Clone ID: LIB35-008-Q1-E1-G3
nnnnnnnnnnnnnnnnnnnnnnnnnnnnnnnnnnnnnnnnnnnnnnnnnnnnnnnnnnnnnnnnnnnnnattggtttggtctccggaaacagcatcaaaggcttatatagacaccgttaaatcgtgtgagaatcttgaaacgccggacgcggcggagttaatagcggcgatggcggcgggatggaacgtgaagctgatcgtggaaacttggtcagaaggagacgcaatagcttcaagtattggtttaaacgtagcaagcaaacacgcaaacgctaaacacatatgtatagtacaaaactcaagatcagaatctgcttanctcaaacctattcaagaatcctcatctccccttgaacnttccaagaagactatccgtccgctgaaagaaccccgggaaaaagcgatgaaagaanctaccaaagga

SEQ ID NO: 18483 - DNA, 467 bp, Arabidopsis thaliana
  unsure at all n locations
  Clone ID: LIB35-008-Q1-E1-A2
cggtttcctggcccacggtccggaaacccgggtcgacccacgcgtccgtacggntgcgagacgacagaagggtacggctgcgagaagacgacagaaggggggaatccagaggttttgtttctgaatggaaacaagtttttgggagttttgattgtgcctccaacaagtttcttggcatccaacaggaaggggatgcaaagaagtatgtgggtgttccgggcatgaactctatatctaaggccttgtgtaatgagtctggtgttaagagtatgtttggaactggtattgccaagatggaatggttggcagaagagataccatggttgttgacagattcaaaaggagaaaatttgggtcgtttcgatggagtggttgcatcagataaaaacattgtttctccaaggtttactcaagtaactggactcccaccgcctctggacttaaatccaatcccggagttggcnact

SEQ ID NO: 18484 - DNA, 409 bp, Arabidopsis thaliana
  unsure at all n locations
  Clone ID: LIB35-008-Q1-E1-A3
cttgaagatggaagaactttggctgactacaacattcagaaggagtccacacttcacttggtcttgcgtctgcgtggaggtatgcagatcttcgtgaagactctcaccggaaagactatcactttggaggtagagagctctgacaccattgacaacgtgaaggccaagatccaggataaggaaggaatccctccggatcagcagaggcttattttcgccggcaagcagctagaggatggccgtacgttggctgattacaatatccagaaggaatccaccctccacttggtcctcaggctccgtggtgggtatgcaganttttcgttaaaaccctaacgggaaagacgattactccttgaggtggaaattctgacaccaatcaacaannncaaggccaagattcaagacc

SEQ ID NO: 18485 - DNA, 424 bp, Arabidopsis thaliana
  unsure at all n locations
  Clone ID: LIB35-008-Q1-E1-A5
aagacgacagaagggtgcggctgcgagaagacgacagaagggtacggctgcgagaagacgacagaagggtacggctgcgagaagacgacagaagggtacggctgcgagaagacgacagaagggtacggctgcgagaagacgacagaagggtacggctgcgagaagacgacagcaggatacggctgcgagaagacgacagaagggtacggctgcganaagacgacagaagggtacggctgcgagaagacgacagaagggtacggctgcgagaagacgacagaagggtacggctgcgagaagcgacagaagggtacngctgcgagaagacgacaaaaggtacngctgccnaaaagacnacagaaaggtaccgctgccaaaagacnacagaaaggtacngctgccgaaaacnacagaaaggtaccgc

SEQ ID NO: 18486 - DNA, 456 bp, Arabidopsis thaliana
  unsure at all n locations
  Clone ID: LIB35-008-Q1-E1-B1
gcgtccgtacagatgcgagaagacgacagaaggggagagtcatcaagcgtattctcgaacccaaccctattaccagaataagtattgcagagttgctcgaagatgaatggttcaagaaagggtacaagccgccatcatttgaccaagatgacgaggacataaccatagatgatgttgatgctgcttttagtaactccaaggaatgtcttgtaactgagaagaaggagaaacctgtatccatgaacgctttcgaacttatctctagctcaagcgagttcagtcttgaaaacttgttcgagaagcaagcgcaacttgtgaagaaagaaacgcggtttacttctcaacgatctgcgagtgaaataatgtcgaaaatggnagaaaccgcaaagccattaggccttaatgtccgttaaagacaactaccaagattaaaaatgaaaggngacaaaagttggc

SEQ ID NO: 18487 - DNA, 490 bp, Arabidopsis thaliana
  unsure at all n locations
  Clone ID: LIB35-008-Q1-E1-A11
tctgcccngctctaccggaanggacatcccggntcgacccacgcgtccncccaagcgtccgcccacgcgtccgtacggctgcgagaagacgacagaaggggatagaaagaaaaagaagttgaaagagaaattgcttaaggaagcttcgaaagctgacaatagaggtgtttgctacttaagtcgtatcccaccacacatggatcacgttagacttcgccgtattctcgctcaatatggagaactcggaaggatttatcttgcacctgaagattctgaagcacaagtgcaccgtaagcgggctggtggatttcgtggccaaaggttttctgaagggtgggtggagtttgctaagaagagcgtagctaaacgggttgcagatatgctaaatggagaacaaatcggggggaaaaagaagtcatcagtatactatgatatttggaacatcaaatacttgaccaaatttaaatgggatgatcttactgaagaaatt

SEQ ID NO: 18488 - DNA, 416 bp, Arabidopsis thaliana
  Clone ID: LIB35-008-Q1-E1-B10
tctagtgggtatggtgagcctaaactggctctgatcaggcggtggatcaacggtgttgttagtcggaaagtgaaatatctcggtgttttggatgattcatgtgataattatgagttcgagatgcctccaaccctttacacttgtgagaccttagtatacttaacgctcgatggactatccttggctagtcccaagtttgtttctttaccttctcttaaagaactccatctaagtatagttaagtttgccgaccatatggcgttggaaacactcatctcacagtgcccagttctagaaaacctaaatatcaacaggagttctgtgatgattttgaattacatgtgtgcgtctcagtcactattgagctcactcatgttgcggacactgatgaaatgttgaatgaagatctagtatcg

SEQ ID NO: 18489 - DNA, 337 bp, Arabidopsis thaliana
  unsure at all n locations
  Clone ID: LIB35-008-Q1-E1-B7
ggctgcgagaagacgacagaagggtacggctgcgagaagacgacagaagggtacggctgcgagaagacgacagaagggtacggctgcganaagacgacagaagggtacggctgcgagaagacgacagaagggtacggctgcgagaagacgacagaaggatacggctgcgagaagacgacagaagggggccttagagggagaatgtcaaaggaaaatatagaagataagtcatgtactcatattcatgtccaactaaatatataatgagaaaggcaaatgaatgttttcaagacanattnattnnanacttangttnaaatanaaaaaaaaagcggcc

SEQ ID NO: 18490 - DNA, 451 bp, Arabidopsis thaliana
  unsure at all n locations
  Clone ID: LIB35-008-Q1-E1-C3
gcgtccgtacnnatgcgaagaaaaacaacagaaaggggaaacccgggaagctttttggaaaanggaggtggaggaagccaagatcttgctcggctttcctcctaattctcgtcccgatccttctcaggttaaagctgcttacaggaagaaagtatgggaatcacatcctgacttatttcctgatgatcagaagcttgttgccgagtctaagttcaaatcgatatctgaagcttattcttgcctagagcctggtgatgttaaaggtcaatggtattacagagcangtgtgtattcgagggtcgtcaagactggggttcctcggccatattcatctgccaaaagaggtaaccgttggttgatcggtgcacctttccttttgattgtcttaggaaccatcggacttggtggaatcaaagctaacanggcatataatttgcaaaaacagacgttc

SEQ ID NO: 18491 - DNA, 385 bp, Arabidopsis thaliana
  unsure at all n locations
  Clone ID: LIB35-008-Q1-E1-C4
gcgtccgacggatgcgagaagacgacagaagggtgaggaatctgacaaagtcagttgtcagaggtcaattnnnnnnnnnnnnnnnnnnnnnnnnnnnnnnnnnnnnnnnnnnnnnnnnnnnnnnnnnnnnatgttggtagcattagtatagatggctgacgaggcttcccaatacagatctcttttcgattgttagttatcatttatcaatatcaaatcaaaccaagctatccagtagctttaataaggaccattgtgacaagtgactttcagtttgaaattttatgtcagagactttgattcaaatttgtaatttctttctaatgtcgccaaatctgggtataaactaagaantnatacctttggttgacacnacttattgaga

SEQ ID NO: 18492 - DNA, 465 bp, Arabidopsis thaliana
  unsure at all n locations
  Clone ID: LIB35-008-Q1-E1-C6
ccaaaaatcccgggtcgncccacgcgtccgtacnagctgcgagacgacagaaggggggaatggctgggcaagaagcaagtcctgcttccttgtttcagttatatgttgattatgggcgtcttacagaggcaactaatttgctacttgagtacatggaatcatttgcttcatcgaaaccagcagaggtattgaagaggaaaaaggtatccggagtttggtttccgtgcacaacagtagaaagactatggtgggagctagagaaaacaatgaactcaggacgaatggtggagcaatgccataagctgaaggaacaacttcatcatgcattactcaatcacttaaaactgcttaaggtggactcaaatgatgctgtatcctctgcaaccggttaaagaaagtcctgattgttccgtgttaatattantatatctgtatcaaaatcntatcaagctttgtttcccntta

SEQ ID NO: 18493 - DNA, 504 bp, Arabidopsis thaliana
  unsure at all n locations
  Clone ID: LIB35-008-Q1-E1-C8
tgngcctaccgtgtccgaanatcccgggtcgncccacgcgtccgtacagctgcgagaagacgacagaagggttagggcaaaaggcaaacaaagagttcaattccgtcggtgacgatttcaattcattgtctaacagtattgaaggaggtaccaagtggttagtcaacaaactcaaaggaaaaatgcagaagccattacctgaattgttgaaggaatttggtctaccagttgggatcttcccacaggatgctacaaactatgaattcaacgaagagacgggtaaattgactgtattcatccctgagacatgtgaagttgggtacagagattcatccggttcctgccgggttttcaaactaacggtaaacgggttnactttggagaaaagggaaagctaagcaanaaagtnggaaaggcattgaaaggacaaagggttatgatatgggttgaaagtgacttgtatctcaagctgattcatcaaaaggtatatttcacaagcccggg

SEQ ID NO: 18494 - DNA, 414 bp, Arabidopsis thaliana
  unsure at all n locations
  Clone ID: LIB35-008-Q1-E1-C9
aagacaacagaagggtacggctgcgagaagacgacagaagggtacggctgcgagaagacgacagaagggggaagacatttcttccctctggatctccaaaagtaagaacatttacaagaaacgagaggtttgggtggggaaggaaagaaggaggaagaggcaatgtcagctaggtattggtgtcacatgtgttcgcaaatggtgaatccagttattggtgccgagatcaaatgccccttttgccaaagcgggtttgtcgaggaaatgagccgtgagattaatggcggcagcagtagcagtctaagggaggttcaagaccctgagattgattttggtacagaccgtgcattgtctctatggggtccaatcttgcttggaatgataantatctcgtagacgtanaaggttaagagg

SEQ ID NO: 18495 - DNA, 419 bp, Arabidopsis thaliana
  unsure at all n locations
  Clone ID: LIB35-008-Q1-E1-D1
ggctgcgagaagacgacagaagggttccnnnnnnnnnnnnnnnnnnnnnnnnnnnnnnnnnnnnnnnnnnnnnnnnnnnnnnnnnnnnnnnnnngcggccgcnctanaggntccaagcttacntacgcgtgcatgcgacgtcatagctcttcnatagtgtcacctaaattcaattcactggccgtcgttttanaacgtcgtgactgggaaaaccctggngttacccaacttaatcnccttgcagcacatccccctttcgccagctggcgtaatancgaagagggccgcaccgnttgcccttcccaanagttgcccaacctgaatggccaatgggacccccccttttncggggcaataancccggggggttttgtgggtaccccaacggtgaccgctaaacttgcaancgccctaacccc

SEQ ID NO: 18496 - DNA, 402 bp, Arabidopsis thaliana
  unsure at all n locations
  Clone ID: LIB35-008-Q1-E1-D2
tgaaccaaagtanaaaacaaagactcgagttgatatgtctagtactaaagatatgtcaactgtccaaaacgcaactccttttaacggcgttgccccatccaccaccgtgcgagttacaatcgtccaatcctccaccgtctataacgatactcctgccactatanacaaagcggagaagtatattgtggaggcggcaagcaagggagcagagctagtgttgttcccggnngggtttatcngtggctancctcnaggttttaggttctggtttagcggttggcgttcataaacgaanaagggngtnatnagtttcggaantacaangcttcggctattcatgttncctgnccctnaggtacaaagnattggcttgacttggcnnggaaaaccaagttttactng

SEQ ID NO: 18497 - DNA, 430 bp, Arabidopsis thaliana
  unsure at all n locations
  Clone ID: LIB35-008-Q1-E1-D3
aaatgggttctcctgggncccaccggtccggganantcccgggtcgacccacgcgtccgcccaaaacgtccnttacggctgcgaagaaagacgaacagaaagggtacgggcttgcgaagaaagacgacagaangggtacgggctgcgagaagacgacagaaggggtacggctgcgagaagcgacagaagggtacggctgcnagaagacgacagaagggtacggctgcgagaagacgacagaagggtacggctgcgagaagacgacagaagggtacggctgcgagaagacgacagaaggatacggctgcgagaagacgacagaaggatacggctgcgagaagacgacagaagggtacggctgcgagaagacgacagaagggggtacataaaagcttaaaataaaatntnancnncaaaaaaaaaagcggcc

SEQ ID NO: 18498 - DNA, 418 bp, Arabidopsis thaliana
  Clone ID: LIB35-005-Q1-E1-F8
aagacgacagaaggggaaggcatgaaagaggcaactaatggctatgatgagagcagaatcttgggccagggaggtcaaggaacagtctacaaagggatattgccggacaacactatcgttgctataaagaaagctcggcttgcagacagtagacaagtagatcagttcatccacgaagtgctcgtgctttcacaaattaatcacaggaacgtggtcaagatcttgggttgctgtctagagactgaagtccccttgttggtctatgaattcattaccaatggcacccttttcgatcacttgcacggttccatttttgattcttctcttacatgggaacaccgcctcagaatagcgatagaagtcgctggaactcttgcttatcttcactcctctgcttctaatccaatcatccatcgcg

SEQ ID NO: 18499 - DNA, 493 bp, Arabidopsis thaliana
  unsure at all n locations
  Clone ID: LIB35-005-Q1-E1-F9
cctgtnctaccggcccggaaatcccggatcgacccacgcgtccgcccangcgtccgtgcgagaagacgacagaaggggggaggtgaagctggcaaagatgctgagatgggggaggagcttaaaatgagttttacatcccctcagtcagcagtgcaagaagatgatggaggggagtcaaagacggaggggagtagtgaaagcagcaaagcaagatctggaagtcacagagattttcagcaagaagaggacgttatttaagataagcattcttctcgaccagctaacaataggaaacagtacgataacaatgcacctcatcagagcagaaagaatcaggacagagggaaggaaatggaaagaacacgagcggcgagcaaaggtgatagagagaactctaatccacatatggagctcgattctacttatatctactcaattgcaagtcgcgaggattttgataaaagaaaagagcgagatgtttatggggcaatct

SEQ ID NO: 18500 - DNA, 500 bp, Arabidopsis thaliana
  unsure at all n locations
  Clone ID: LIB35-005-Q1-E1-E3
actggtntgccttgccctagccgtccgganatccaaggtcgacccacgcgtccgcccangcgtccgcccacgcgtccgtacggctgcgagaagacgacagaaggggatctcgcgagagacagaaagggacgattattggttggtgaaatttagagcatttttgggaattgggtaaacttttcgatggcgacttcgaagcttcaagctatttggaatcaccctgccggacctaaaaccattcatttctgggcaccaacgttcaagtggggtattagcattgccaacattgcagactttgccaaacctccagagaaactttcctatcctcaacaaatcgcggttacatgcactggtgttatttggtctcgttacagcatggtaatcaatccgaaaaactggaacctcttcagtgttaatgttgctatggcaaggacaggcatataccaacttgctcgtaaaataaaacacgantatgcaaccgaanctgaacctgccttgcg

SEQ ID NO: 18501 - DNA, 479 bp, Arabidopsis thaliana
  unsure at all n locations
  Clone ID: LIB35-005-Q1-E1-G10
ccggnccggaaatcccggancgacccacgcgtccgcggnngcgagaagacgacgaaggactaagacatcacgaggaacacgatgggtgaagcggtcaaggatgggagagaagaagtgattcaagcttggtatatggatgatagtgaagaggatcagagacttcctcaccacaaggatcctaaagagtttgtatcgttggacaaacttgcagagctgggagtacttagctggagacttgatgctgataactatgaaaccgatgaggatttgaaaaagatccgtgaatctcgtggttactcttacatggacttttgtgaggtatgcccggaaaagcttccaaactatgaagtgaaagtgaagagctttttcgaagaacatttacacactgatgaggagatccgttactgcgttgcaggaactggttactttgatgtgagagatcgtaatgaagcttggattaaggtattggtaaagaangg

SEQ ID NO: 18502 - DNA, 332 bp, Arabidopsis thaliana
  unsure at all n locations
  Clone ID: LIB35-005-Q1-E1-G11
aactggtttgcctggctctaccgncccgganatcccggaatcgacccacgcgtccgacggatgcgaagaagacgacagaagggtacagctgcgagaagacgacagaagggaggncanagaggtgttcagtgttctcttatgtatgcgtgtatgannnnnnnnnnnnnnnnnnnnnnnnnnnnnnnnnnnnnnnnnnnnnnnnnnnnnnnnnnnnnnnnnnnnnatttttgctgcaatgaaaataaaaacttgtanatacttaacttcagttttgttttcttatgtcaatttagctcaaaaaaaaaaaanttcnaagnananaaaaagcggcc

SEQ ID NO: 18503 - DNA, 420 bp, Arabidopsis thaliana
  unsure at all n locations
  Clone ID: LIB35-005-Q1-E1-G6
agaaggggactgaaagaaaaaaatgaacaaactctccaacgctttctctgtcctggctttcgccgatgaagatgctccaatggcttcttcttcttccactgggaaacaagaagaaagtgtaaatgggtcacttgaggatggagattacaagcaaccacttgtttggattgacttggaaatgactggattaaatgttgaagttgacaggatattggagattgcatgtataattactaatggagatttaacacaatcagtggagggtccagatttagttgtacgtcaaacgaaagactgtttggataaaatggatgactggtgtcaaactcatcatggagctagtgggttgacgaagaaagtgctcctcagtgcgataactgaaagggaaactgagcaaaagtcatcgaattcgtaangaag

SEQ ID NO: 18504 - DNA, 413 bp, Arabidopsis thaliana
  unsure at all n locations
  Clone ID: LIB35-005-Q1-E1-G8
tcttaaaatgggctgcaacgaatctcggatatccatccttggcagagatagaagctgctccaccaacagctgagcttgagcccattcgttctgactattctcagctcgatgaagtcgacgtgggaatgacatatgaagagctttcagtctatggaaggatgaggaagatattccgttgtggaccagtatctatgttcaagaatctatgttacaagtggggaacaaagctaagcccagcagaagtagctgagaaagtgaagtatttcttcaaatattattcgatcaatcgacacaaaatgactgtcctcacaccgtcctatcacgctgagagttactccccaagaggacaacagattcgatctgangcagtttctgtacaacagcaagtgggcataccaatttaaagaagantg

SEQ ID NO: 18505 - DNA, 475 bp, Arabidopsis thaliana
  unsure at all n locations
  Clone ID: LIB35-005-Q1-E1-H2
agcntccggaatcccaggtcgacccacgcgtccgtacggcgcgagaagacgacagaagggggcgccgcgctttctctctctaaacttagctcagcctatcgattaattcctctccggaataaggaaatttcacctcgatttattgattagtcggaagaattcggaaccaattctgaaccagacctgaaattttccaatggggcggaagaagccgagtgctcgaggtggagatgctgagcagcaacctcctgcgtcatctctcgttggtgctactaaatctaagaagaaaggtgctcaaattgatgacgatgagtactcaataggtactgagttgtctgaggagtctaaagttgaggaagagaagttgttgttatcactgggaagaagaagggtaagaaaggtaataagaagggtacgcaacangatgatgatgatgaattttccgataaggttccgctgccggggtnaaagacat

SEQ ID NO: 18506 - DNA, 485 bp, Arabidopsis thaliana
  unsure at all n locations
  Clone ID: LIB35-005-Q1-E1-H9
tgtgtntaccggcccggaaatcccgaancgacccacgcgcccgcccangcgtccgtacggctgcgagaagacgacagaaggggaaaaataaaaaaaaaaacagagaaaaggagatatggaatcaatcggagtccttatgatgtgccccatgtcctcctacctcgagaacgagcttgagaagcgcttcaaccttcttcgcttctgaacttctccggagaaatccgtcctcctagaaactcatcggaactccatccgcgccgtcgttgggaatgcttctgccggcgccgatgctcagctcatcagcgatctgcccaaccttgagattgtatccagcttcagcgtcgggctcgacaagatcgatttggggaaatgcaaagaaaaagggatccgcgtcaccaacacccccgacgttctcaccgaagacgtcgcagatctccgccatcgggcttatcctggctctccttcgacgggtgtgtnaagtgcga

SEQ ID NO: 18507 - DNA, 421 bp, Arabidopsis thaliana
  unsure at all n locations
  Clone ID: LIB35-006-Q1-E1-A12
agaagggggaagcaaattagcactgaccgatcgatccatggaagaggtgaagaaggatgtatactcggtttgggcattaccagatgaggaatcngagccccgattcaaaaagctaatggatgctttgagatccgaattcactggcccaagattcgttcctcacgtcaccgtcgccgtatctgcttatctgacngcagacnaagccaagaagatgttcgaatcagcttgcgacggtcttaaagcttacaccgccaccgttgatcgcgtctccaccggaactttcttctttcaatgcnttttcttgcttctccaanccacccctgaggtaatggaagctggtgaacactgtaanaancatttcaattgttccactancacaccttacatgccgcatttgagcctactttacgccganttgaca

SEQ ID NO: 18508 - DNA, 427 bp, Arabidopsis thaliana
  unsure at all n locations
  Clone ID: LIB35-006-Q1-E1-B10
agaagggggagggagatangtcantcctcaaaattaccanacanacattanctccantaattgcaacagatcactctcacgcaaacaangacttttcaaaagccctaatccgagaaatcattcgacaacancacganggagatggatctanaagattgggaaatactccccaaaatcaactacaagggtctcgaacttgatctcggtcatgaagaggatcatgagagttacgaanatgatgaagaaacaccgcanaaagcttcgacagtgattacntcatctgcncaattcaagattctgtcggaaagatagagtttcttcatcagatatctagcgtggtccccanacaactcctcnaagattccaatancttgggaacctttgtcccccgtggacnacaaagatnacaataagtacctggattcgg

SEQ ID NO: 18509 - DNA, 451 bp, Arabidopsis thaliana
  unsure at all n locations
  Clone ID: LIB35-006-Q1-E1-C11
gcgtccgtanaagacnacagaanggtacggctgcgagaagacgacanaagggtacngctgcganaanacnacagaagggtacggctgcnagaagacgacagaagggtacggctgcgataagacgacagaagggggccgtcaaaggttaaacagtcnaaacaatggngattctgaancttgatgtagcgaagtttccagaaattgangatanaagtcgaattaactaacccaaagagaaacgacgaagtagaagattgcgacgaccaacaagangcagcagctagctacacangaagatgaanaggaagacnanttgagaaagcttctgctttcagatattggagaanttccgatttctcctccttcagctacacaagtcaattttgtttcttacttcatcacagattttactaaatcgggtcatgatcaatatatttaccgtcacgctaat

SEQ ID NO: 18510 - DNA, 410 bp, Arabidopsis thaliana
  unsure at all n locations
  Clone ID: LIB35-006-Q1-E1-D10
gaaggggacttggtcgtcatctaccttctcagaaagggagctgcatcaatggcgaccaataatgattttggagctttcattgagaaagttacaatctctccaacttctacttcctcgtcgcctccttctctacagggtcttactttcgccattaaagacatttttgatgtggaaggacgcnttaccggttttggtaacccggattggttaangacacactcggcanctacttctacagctccantagtttcatctctcttataagctggtgccacanctttgggtattaccattatggatgaaatggcttanagtataaacggagaaaatgcgcattatgggactccganaaacccgattgctttcgatagagtgcctggggggattatcgagtggctcaanccgtaact

SEQ ID NO: 18511 - DNA, 392 bp, Arabidopsis thaliana
  unsure at all n locations
  Clone ID: LIB35-006-Q1-E1-D9
ggattacggtacctttagaaagagaagcttccatatatcacagccatggtggttgtcactcacatctccacttccttccancaaatctctccttccttcttccatctccgtcttcgtaatccctccaccacttcttcgtctcgtcccaaactcgacggtggtttcgctttgtcaattcgagcttacatagagaaaccaaactctttctccaccttcgctaacaaagtcatcggttctcttcccgttatcggactcctcgctcgaattatcaagcgatgaaggcggcgttggtagagatctcgtcgatttcgctgagtttaggaaacgagttgggaataaatgtactcctgatgattctagggctttctatgagttccaacagcgacgaagca

SEQ ID NO: 18512 - DNA, 504 bp, Arabidopsis thaliana
  unsure at all n locations
  Clone ID: LIB35-005-Q1-E1-B4
acggttgccttgcctagcctccggaatccaaggtcgacccacgcctccgtacggctgcggaagacgacagaagggtacggctgcgagaagacgacagaagggggacacagaaacaatccaaaggtgagatctcttatagtttcgagattcgaggaagacttttggatacgatcagcttcagtcttccacaacttaacattgctcagggtgttggatctttctagggtaaagtttggaggagggaagttaccttctagcattggagggctcatccacttgagatacttgagcttatacggagctgtggtatctcatccaccttccactaatgcggaacttaaaagcttccgctcctttttgaacttaccttgtttgataacaanggaaccgattcacgttgncaaaatgttttngaaagaaatgctaanannttaaggtaacctttcccaactcnagggaaaatgggtgataaaaaccaaatttgggaaattggggtgattcnaa

SEQ ID NO: 18513 - DNA, 456 bp, Arabidopsis thaliana
  unsure at all n locations
  Clone ID: LIB35-005-Q1-E1-B5
gcgtccgtacggctgcgagaagacgacagannnnnnnnnnnnnnnnnnnnnnnnnnnnnnnnnnnnnnnnnnnnnnnnnnnnnnnnnnnnnnnnnnnnnnnnnnnnnnnnnagttgaacagttgcttcaagcagctcaagatgagatgatactaaagctctctgttgattctcacacttctcgatcttcttccgattatttagatccagatcttcactctagatttctcgctctcaaatctcaaaagaagaaggatcagcagcaacaacagaaacaacggccgagaatgcagccgaaatcaaaggatgtggttgaggaaacaccaagaagatctcatgcttagattcgcggctctgaaaacttctctcccctccgcgtcttcttcgtcctctgttcttcttcangatgaaatccgagaaagatggtgatgaaatcggagaaaatgctgaanttggt

SEQ ID NO: 18514 - DNA, 485 bp, Arabidopsis thaliana
  unsure at all n locations
  Clone ID: LIB35-005-Q1-E1-B3
ctagcctccgganatccaggtcgacccacgcgtccgcccaagcgtcngtacggctgcgagaagacgacagaaggggaaagaagagatggagaatactttgtcgccgttgttgtcaccgtcgccggcaagtgaagtcgctgcgagagtatcgtctttgttcgtttatccgatcaaatcatgtcgaggaatttctctgtctcaggcagctctcactcccaccggatttcgatgggatcgaaactggttgattgtgaattctaaaggaagaggattgactcagagagtggaaccaaagctttctttgattgaagtagaaatgcctaagcatgcgtttggagaggactgggagcctgagaagagctctaacatggtggttagaagctcctggtatggatgcccttaangtctccctagctaaacccgacaaaatacagacggtgtctcaatttgggaattggtctggctccgcactanatgaaaggaaa

SEQ ID NO: 18515 - DNA, 451 bp, Arabidopsis thaliana
  unsure at all n locations
  Clone ID: LIB35-005-Q1-E1-B6
gcgtccgtacggctgcgagaagacgacagaaggggaccttagggaaaaaaaactcaagagacaaaaaaaaaggaaggcgcgtcagtgatggagaagattattgacgtagcttatggcgcatcagtgaaggtgggtttgacgttgttggagatgaatctgttgccggatattgtcattaggcggctcacacgtctgcttctggccggtcgtctccgttccggttacaaacccacggcggagatgcaactctccgatctcctccgttttgttgactctataaagaagatgcctatagctatccataccgagaagccaaagactcaacactatgaattaccgacagctttcttcgaacttgtccttggaagaaacatgaagtacagctcttgttacttctcaaacgattcaagtagcttanaagatgcanaggaagcaattttggctccttaat

SEQ ID NO: 18516 - DNA, 282 bp, Arabidopsis thaliana
  unsure at all n locations
  Clone ID: LIB35-005-Q1-E1-C1
aactggtttgcctctcctagcctccggaatccaaggtcgacccacgcgtccgacggctgcgagaagacgacagaaggatacggctgcgagaagacgacagaaggatacggctgcgagagacgacagaagggtacggctgcgagaagacgacagaagggtacggctgcgagaagacgacagaagggaactgatactgttttgagattttatgtttgtcaagatcaagaacgtctgtggttatttctggttnnnnnnnnnnnnnnnnnnnnnnnnnnnngcggc

SEQ ID NO: 18517 - DNA, 493 bp, Arabidopsis thaliana
  unsure at all n locations
  Clone ID: LIB35-005-Q1-E1-C10
actggtctncctgggtctaccggccccggtcatcccggnatcgacccacgcgnccgcccaaacgtccgtacggctgcgagaagacgacagaagggtacggctccgagaagacgacagaagggtacggctgcgagaagacgacagaagggtacggctgcgagaagacgacagaagggtacggctgcgagaagacgacagaagggtacggctgcgagaagacgacagaaggggatggcaacgatttcgtcaactctactcttaaattcttctagatcagctttaccactaagattcccaaaattctcgggattttcttcttcctctccattcgctagatcttacanatttggacgacntaatctggaaccactttccaacgggatgctttcgtcnggaagtanagccgacggtgctacggcngcggctgcatcnatggnangantgatgacggaggcnatgaanctgattcatcggggtttacaactttggaatc

SEQ ID NO: 18518 - DNA, 502 bp, Arabidopsis thaliana
  unsure at all n locations
  Clone ID: LIB35-005-Q1-E1-C12
gaactggtctgcctgtctctaccggcccgganatcccgnatcgacccacgcgtccgcccaancgtccgtacggctgcgagaagacgacggaaggggggggtcgcagtgaccaggcccgggcgactgtttaccaaaaacacaggtctccgcaaagtcgtaagaccatgtatgggggctgacgcctgcccagtgccggaaggttaaggaagttggtgacctgatgacaggggagccggcgaccgaagccccggtgaacggcggccgtaacaataacggtcctaaggtagcgaaattccttgtcgggtaagttccgacccgcacgaaaggcgtaacgatctgggcactgtctcggagagaggctcggtgaaatagacatgtctgtnaagatgcggactacctgcacctggacagaaagacctatgaagcttcactgttccctgggattggctttgggcttttcctgcgcaacttaagtggaaggcgaaaaangccccttccgggg

SEQ ID NO: 18519 - DNA, 490 bp, Arabidopsis thaliana
  unsure at all n locations
  Clone ID: LIB35-005-Q1-E1-C2
antggttgccttgcctagccgtccggaatccagggtcgacccacgcgtccgtacggctgcgagaagacacagaagggggtctcagcgccgcgttttttctctcctcatcctctcgacgaattcctctcaagcttgcttcttccatttttctcttagaccaatctcgctttcgcatccctcctatgccatcctctcgaaacgagacccatttctgtgttctcaacccagaaaatgccttactacgaatttgaatatgtcaagaacgagacaagggcattctatacaaatgaacagaagacatcttcttatgaaagaaaggaagagtttttcgataaattattccgataagttcagagatgattctatgagtagcgaggagatgcatacagatgctttggatgtggagattattccgccagattcacaggacattcgtaattcacaagaactctgctgtctccaacacactacaggatgatanggcaaaagt

SEQ ID NO: 18520 - DNA, 414 bp, Arabidopsis thaliana
  unsure at all n locations
  Clone ID: LIB35-005-Q1-E1-C5
gcggctgcttctccattacagaggtaaaaatgacaactccagcagtgaagaccggtttgttcgttggattgaacaaaggacacgtcgtcaccagacgtgagctagctcctcgtcccaattctcgcaaagggaaaacgagcaagaggaccatattcataagaaaactgattagggaagtagctggaatggctccttatgggaagagaatcactgagcttctcaaggttgggaaagacaagcgtgctcttaaggttgctaagaggaagttgggtactcacaagagagctaagaggaagagagaggagatgtctagtgttctccgcaagatgaggtctcttggtggtgctgctgctgctgagaagaagatgtnnacatcctaataagcttctgtgttatggcataattccttccaat

SEQ ID NO: 18521 - DNA, 414 bp, Arabidopsis thaliana
  unsure at all n locations
  Clone ID: LIB35-005-Q1-E1-C7
aaccaaatgaaatcatctcggcccttaaagagacgcgtaagggagatctacagacactttgatcgccatgcccttgaactacttgagaaaatgttggtacttgacccatctcagagaatatgcgcaaaggatgctcttgatgctgagtacttttggactgatccgctgccatgtgatccaaagagtctaccgacatatgaatcatcacatgagttccagacaaagaaaaaacggcaacagatgcgtcataatgaggaagcagccaaaaaacagaaactgcagcatccacagcagcaacattctcgtttacctccacagcaacatggtgttggccagtctcatgccgctccactttggcctgctggaccaaaccaccctatgaacaacaacgcaccancaccccaaatactgctg

SEQ ID NO: 18522 - DNA, 500 bp, Arabidopsis thaliana
  unsure at all n locations
  Clone ID: LIB35-005-Q1-E1-D1
gttcctntgctagcctccggaatccaaggtcgacccacgcgtccgcccacgcgtccgcccacgcgtccggctgcgagaagacgacagaagggggagtttctgtgaactcaaaaaaaaaatcaaatcctttttgagtttcaatctctgagagtttctatgaaacaatcgtcatggggttgcacaatcttcatccaattatctctatgtctcatcatctatgtgtctctgcattcgggtcacccattcttcttctctagtgacgacggtgacaatgccacacctctagatcttcatttcatctccgttgccggcggtttcaggcctcttaaccaccaaactcgccttctccgattgatggagaaagttgcagaaacttacaaggccaaatttgttgtgagctcaagtgaacaagggagaaagaaagattcattcctgcaaaatgcgactcgactgtcttcttcactgaaactttcaatggggacactaagaatgaaaggatc

SEQ ID NO: 18523 - DNA, 506 bp, Arabidopsis thaliana
  unsure at all n locations
  Clone ID: LIB35-005-Q1-E1-D3
aactggtttgcctttgcctagcctccggaantccaaggtcgacccacgcgtccgtacggctgcnaaagacgacgaaggggatgaagataaagcaccatcggaggcacaagtggcatagctcaagaaagacttgcgatgatgacagtaccgaagatgtgagaagaaaacatttaaagcatcacaggcgcagtgaggtggtcacttcaagtgatagtgaggaagagagtggaagaagaaggcgaggcaaatatcacaggcacaacagaggttcagcctcctcgagtggctcggaagaagatagtgggaaaagtatgaagagaaggcaacataaaaggcatcgtttggctgagtcttcaagtgaggaagatggggcaatgagaaggactangcatcataaacatggcagagattcagcatctgagtctgatggaaagaaggtaatcagatgagaaaagagagcactacttcgacaaatgaaaatgggaaatgtccttgttaattcacat

SEQ ID NO: 18524 - DNA, 475 bp, Arabidopsis thaliana
  unsure at all n locations
  Clone ID: LIB35-005-Q1-E1-D4
cgganatccaaggtcgacccacgcntccgtacggctgcgagaagacgacagaagggggtatcgaagagaggcagagagagagcgatgatgattcgaacggcgttagtgttcgttgtcttcttcgtcggaacagtcgtacaagcgcagctgatacctccggcgaggcgtgatggatttttgtatccaccgggtcggaaaatcgaccgggatacgatacttatcgaggcgtatattgacccggtttgtccggattgtagagacgcttgggagccgctaaagctagcgattgatcactatggntctcgcgttgctcttgttcttcacctcattcctttacccttccatgacaatgcatttgtagcatctcgggctttacacatcgttgataccttaaacgccaatgccacgttcaatttgctggaaagggatctcaagcatcagacattgttctacaactcgcaaacacaactcatgt

SEQ ID NO: 18525 - DNA, 338 bp, Arabidopsis thaliana
  unsure at all n locations
  Clone ID: LIB35-005-Q1-E1-D5
tntctgcctgggtcctaccggnccggacatcccgggtcgacccacgcgtccgtacngctgcgagaagcgacagaagggtacggctgcgagaagacgacagaagggtacggctgcgagaagacgacagaagggtacggctgcgagaagacgacagaagggcacggctgcgagaagacgacagaagggtacggctgcgagaagacgacagaagggtacggctgcgagaagacgacagaagggtacggctgcgagaagacgacagaagggctctgttatgagacttnnnnnnnnnnnnnnnnnnnnnnnnnnnnnnnnnnnnnnnnnnnnnnnnngcggcc

SEQ ID NO: 18526 - DNA, 490 bp, Arabidopsis thaliana
  unsure at all n locations
  Clone ID: LIB35-005-Q1-E1-D9
cctgnctctaccgccccggaatcccgnatcgacccacgcgtccgcccangcgtccgtacggctgcgagaagacgacagaagggggagagagtttaaatagaaaacgaattagttgtgtattcaaaccaaggaaagaaaacgagagaggtacgtagaagaaaatggctgccttatcagagaaagaggctgaagcttatctcgacgcaaggcctagatatccgatcgattggtttaagaaaattgccgcacggacacaggaccacaaatttgcttgggatgttggaactggtaatggtcaggctgctattgggcttgtggagcattacgagaatgtagtggctaccgatataaacgaagcacaacttcaacgagcaatcaaacactcaagaatcagttaccatcacactccaacaacgatatcagaagatgagatggtggatctactcgggggagaaaactccgtggatctcatagttgctgctcaagctgt

SEQ ID NO: 18527 - DNA, 273 bp, Arabidopsis thaliana
  unsure at all n locations
  Clone ID: LIB35-004-Q1-E1-G3
gccgtttatcattacgataggtgtcaagtggaagtgcagtgatgtatgcagctgaggcatcctaacagaccggtagacttgaacattccaatatgggctgagaatcggtttgggccggggatagcaatttgatgttatgatgctaggcgaactgtaagaaagatatcaaaaacagaaaagtggagctttctgattaggtaattgctcttaaagctaatataaagttataatttggatattaanaaaaaaaananaagnaaaaaaaaaagcggc

SEQ ID NO: 18528 - DNA, 476 bp, Arabidopsis thaliana
  unsure at all n locations
  Clone ID: LIB35-004-Q1-E1-G8
gcgtccggctgagaagacgacagaagggggatgtgagcattaagttggacgagcaaaagaatgaaagcctcacgcaactcaaagaaaatgagatgttaaggacgaagttgaagcacctggctgatcaatttatgctttcagaacaacaacatgagcaaaggttgaagcagaaagcacttgagctacagatctctgctttaaaaattaaacagcacgaggagaaactcatccatgaacaatctcagatgaaagtttacgcagatcatgtttctcagcttttgtctactgagaaaaatttgcggttgcagctgacttctgatgganataanattccancagttccaggacgcgttggntaagagcaatgaaggtgtttgaaacattcaagccaggaaatccgataagnttgtcnaaagcaatccaangnactcnanangggacaccncatccttggagaacaaaaantgaggaaatcg

SEQ ID NO: 18529 - DNA, 532 bp, Arabidopsis thaliana
  unsure at all n locations
  Clone ID: LIB35-004-Q1-E1-H1
ctgttaccttgcccgtgccggtccgaaattaacgggtcgacgcacgcgtccgcccacgcgtccgtacggctgcgagaagacgacanaaggggacacttgancactactttcgaactctctctttatctctcttgnaatgaagctctctatgcgtttgatctcaggctgttctcatcatgttcatgatattcgtcgccactgggatgggaccagtcactgtggacgcacgcacttgtgagtcgcacagccataggttcaagggtacatgcgtgagtgcatcaaactgcgccaacgtgtaccacaacgaaggctttgtcggaggtaactgccgtggattccgtcgtcgttgcttctgcaccaagacattgctgatctacccattctcatgcataattcaactttgatccatcgtcgtgtgtcaacttctttcntatcnaancttcngtacaggtaccatgaagttnncgtacattagtgtgttccaaatnagtccttggatttggcgggtttcccggtttaantgtagggttta

SEQ ID NO: 18530 - DNA, 428 bp, Arabidopsis thaliana
  unsure at all n locations
  Clone ID: LIB35-004-Q1-E1-F5
ggagaagacgacagaagggctctctgacctcatgtcacacctccctatcaagaggggattatcaaagttctatgaaggaaaatctcaatcattcacatcactaggaaatgttaaaagccttgaagatcttatgaagagagggtttaaaagtagaaactatggagcaaaaagaaagtcatctaggagtactggagggattttagatcaaagctacaaaagggtttttagtcctaaagctacaatctccaagaaacccaacagaacaccttcctctgttctctcttgtctagccagaagaagacattagatctcagacaaacattagtttcttttacaagttttaaccctttttacgattcaccaaaatcggtttcagtaacatganaacaacannaaacatcgtngcattccactgtcctaaatgggtn

SEQ ID NO: 18531 - DNA, 406 bp, Arabidopsis thaliana
  unsure at all n locations
  Clone ID: LIB35-004-Q1-E1-H10
aagacgacagaaggggggaaagagtgtttctcccaatcgatcccggtgttgttcttctcgacattgctttcgtccccgacgaacctagccgagggtttttacttggaacgagacagactttgttagagactaaagatggtggaagcacttggaatccacgttcgattccttcagctgaagaagaagatttcaattatagattcaattcgattagctttaaaggcaaagaaggatggattattggcaaacctgcgattttattgtacactgctgatgctggagagaattgggatangattcctccaagttctcaacttcctggagatatggggtttataaaaagcgacagnagatangagtgcaaaaatgggtacctgataaagggncatttagtaactcaacaagg

SEQ ID NO: 18532 - DNA, 396 bp, Arabidopsis thaliana
  unsure at all n locations
  Clone ID: LIB35-004-Q1-E1-H11
aaggactaagacatcacgaggaacacgatgggtgaagcggtcaaggatggagttatccttgctcgttgtctaggtgaancgataaaggcaaagagtctgaaaggtgaaacagaagaaaatgaagaagagggttataanaggattgaagaaggtttnaagaagtatgcaggagaaaggaaatggagaagcattgatcttataacaacggcatatacagtangattcatacagcagagcanagggaagtggatgaacatgttcagagacaggttcctgtcgtcttacctttctangatgctgctgaaaaactcccatttcgattgcggaaccttgtcccatgatgattcncaaacaataantcanaaaccntgtgnntcctcttgtcaccnccaaact

SEQ ID NO: 18533 - DNA, 509 bp, Arabidopsis thaliana
  unsure at all n locations
  Clone ID: LIB35-005-Q1-E1-A10
aactggtttgcctgnctctaccgggccccgganatcccggaancgacccacgcgtccgtacganctgcganaagacgacagaagggtacggctgcgagaagacgacagaagggggtgctaggttgttcttgggtggtataggtgtggaaaacaccggaactgagattgcaactgctttgaacaatatggtcgtgagctgcgagtacattctcaaactaaagcatgaaatcgaggagcaatgtactgaggtatttcctgcaccagcagatcgagagaggataaaatcatgtctatccgagctaggcgagttaagcagcacgttcaagcagttactcaactcaggcatggaacagctagtagcaaccgtaacaccaagaatccgtccggttctagacaccgtggctaccataagctacgagttaacagaaaccgagtacgcaganaatgaggtgaacgacccttgggtccaaaagacttctccactcaatcgaaacnaaatgccgcgtggc

SEQ ID NO: 18534 - DNA, 504 bp, Arabidopsis thaliana
  unsure at all n locations
  Clone ID: LIB35-005-Q1-E1-A11
aactggtttgcctgtctctatggntctagaaagtccggaaattcacnnatcnanccncccaagcgtccgtacggctgcgagaagacgacagaaggggaccagagacttaaactggtttctgtatcttttactgggttctttcagatatataaatggatcaaatcgttaacgtggatgagtttcaagagctggccaaacaggccctccctaagatgtactatgatttctacaatggaggagcagaggatcaacacgctctcaatgaaaatgtccaagctttccgtagaatcatgtttaggcctagggttcttgttgatgtgagcaacatagacatgtctacaagtatgttgggttacccaatctcagctcccatcatgattgctccaacggcaatgcataagttggctcatcctaaaggagaaatcgccacagcgaaagctgcagctgcgtgtaacactatcatgatagtatcattcatgtctacttgcactattgaggaggttg

SEQ ID NO: 18535 - DNA, 483 bp, Arabidopsis thaliana
  unsure at all n locations
  Clone ID: LIB35-005-Q1-E1-A12
accggccccgganatcccggatcgacccacgcgtccgcccaancgtccgcccacgcgtccgtacggctgcgagaagacgacagaaggggaagtagagataaaagaaagtttaattagctcagattcagctcatgcaacgtcctaaattaggtcagattcagtgattagtgataagtagtaacagagagatttattaagatgttgtcgtcgtcaacagtttctttcatgttattttttcctcatgttttcgatccatatgaatgaagctcttggtgctcaaattgaaatccgcaaactcgaagagacgatggtgatgaggaggaacaagaaaggtaatggcttcgtaacctccaaaatagatgttccaccaagcgcatcacaacattgcgggggaggtaaacgttttaagaacatggcgaccactaatcgccatgatgatcagttcaatccactttcangaagngtctcttcctccctccgtat

SEQ ID NO: 18536 - DNA, 494 bp, Arabidopsis thaliana
  unsure at all n locations
  Clone ID: LIB35-005-Q1-E1-A3
gcctanacgtccggaatccnaggtcgacccacgcgtccgacggctgcgagaagacacagaagggtacggctgcgagaagacgacagaagggtacggctgcgagaagacgacagaagagtacggctgcgagaagacgacagaagggtacggctgcgagaagacgacagaagggtacggctgcgnnnnnnnnnnnnnnnnnnnnnnnnnnnnnnnnnnnnnnnngcggccgctctagaggatccaagcttacgtacgcgtgcatgcgacgtcatagctcttctatagtgtcacctaaattcaattcactggccgtcgttttacaacgtcgtgactgggaaaaccctggcgttacccaacttaatcgccttgcagcacatccccctttcgccagctggcgtaatancgaagaggcccgcaccgatngcccttcccaacanttgcgcancctgaatggcgaaatgggaacccccctgttaccggggcattaancccgg

SEQ ID NO: 18537 - DNA, 500 bp, Arabidopsis thaliana
  unsure at all n locations
  Clone ID: LIB35-005-Q1-E1-A4
aatggtttgccttgcctagcntccggaatccaaggtcgacccacgcgtccgtacggctgcnagaagacaacagaaggggaaagctcaaaaagcaatgactcgaccgtcaagattacttgagacggcggcgccaccaccacaaccgtcggaggagatgatcgcagcggaatccgacatggtggtgatcttgtcggctcttctttgcgctcttatctgcgttgctggtctcgccgccgtcgtacgatgcgcttggctccggcggtttacagccagaggagattcgccgtcaccgaacaaaggcttgaaaaagaaagctcttcagtctcttccaagatccactttcaccgccgcggaatcaacctccggcgccgccgctgaagagggagactcgacggaatgtgctatttgcctcactgacttcgccgacggtgaagaaataagaatgcttcctccttgtggtcantccttccacgtggagtgtattgacaaatggctaattt

SEQ ID NO: 18538 - DNA, 404 bp, Arabidopsis thaliana
  unsure at all n locations
  Clone ID: LIB35-005-Q1-E1-A7
aaaaacccctaactttgacatggaaggagagattcaagactgggaaatacttcagagctcgagatctaccacggaagatgacaattcgaggagcttggaggagattgatgatggcacgcaaggtatgattaggtttgatcatttctctcttgagaaccagagtggtttgtctcgtttggaggcaaacgatgaagatgggtctgttcaatcgggtagtccaggatggatcgaacctagctccgatgttccttatggtccgaagcattttagtgagttatggtctgattcaagcagtgatcggcttgatgatcagaggttagtggatgatgatgtgaataacgagatgggtatagagagaaacgaatgggtattgttgaatatatgaaagtatanctcaagacatg

SEQ ID NO: 18539 - DNA, 418 bp, Arabidopsis thaliana
  Clone ID: LIB35-005-Q1-E1-A8
aaagaaagaaaaaaagagaaggcatggccgcggaagaagcgacggagttctacctgagatactatgtcggtcacaaagggaaatttggacacgagttcctggagttcgagtttagagaggacggtaagctccgttacgccaataactctaactacaagaacgatactattatccgcaaggaggtatttctcacccccgccgtgctcaaggaatgcaggcgtatcgtctccgagagcgagattctgaaagaagacgataacaattggccggaacctgaccgtgttggaaagcaagagctcgagatcgtcttgggtaatgagcatatctcattcgctacatctaaagattggatctcctgttgattgccaaaagcagtaatgatcctgaaggactccgcatcctctactatccttgttca

SEQ ID NO: 18540 - DNA, 391 bp, Arabidopsis thaliana
  unsure at all n locations
  Clone ID: LIB35-001-Q1-E1-G3
gacgacaganggggcaagggatacggtgtttacaagtacgtcgacaagtatggagctgactcagacattgcganaagaaacgtgcatggaagacgctgtggtgtgtactcgtagtcctttaaacggcaaccgttggatatgctttcacgtttaagggaaatagcgtggcggagctgactcagacatatgatatgaaccgtataagaanatantaagagttggtanttggtacaagactcgttgttacatagattgaaaaaaggcgtcggcacatgaaccttgcttaatctatagactatttgtaagagttttgataatangaaggacttataaattattttttgggggaatatnatacaagtttgtttttgtaaataanccaattctttgt

SEQ ID NO: 18541 - DNA, 168 bp, Arabidopsis thaliana
  unsure at all n locations
  Clone ID: LIB35-001-Q1-E1-G5
ggctgcgagaagacgacagaagggtacggctgcgagaagacgacagaagggtacggctgcgagaagacgacagaagggtacggctgcgagaagacgacagaagggtacggctgcgagaagacgacagaaggggnnnnnnnnnnnnnnnnnnnnnnnnnnnnnngcggc

SEQ ID NO: 18542 - DNA, 400 bp, Arabidopsis thaliana
  unsure at all n locations
  Clone ID: LIB35-001-Q1-E1-G10
ggctgcgagaagacgacagaaggggatgccttttaggtcatctcatgacatagttggaaaactagttggagtttgcgtctcaaaaggctgtgaacttcagaacttaagtcttgaagagatgaaaaagctgagccctgtgtttgaagaagatgtgtttggatttttgggggttgaaaattcagtcaataagttcagttcctatgggtcaacaggatcaaactgtgttgctgagcaacttggctactgggtcaacaagctcaacattacttccacctgatccggaccaaaccattagcaaaagatttgatgacgtttgtgcaattttcatatttattgaaggatttttgtccttaataccaaggaagatttcaagcaacntgttgcaaccggtttgagaaaa

SEQ ID NO: 18543 - DNA, 480 bp, Arabidopsis thaliana
  unsure at all n locations
  Clone ID: LIB35-001-Q1-E1-H10
ctgttaccctgnaggtacggctccagaattcccnggtcgacccacgcgtccgcccacgcgtccgtacggctgcgaagacgacagaaggggcaagggatacggtgtttacaagtacgtcgacaagtatggagctgactcagacattgcgagaagaaacgtgcatggaagacgctgtggtgtgtactcgtagtcctttaaacggcaaccgttggatatgctttcacgtttaagggaaatagcgtggcggagctgactcagacatatgatatgaaccgtataagaagatagtaagagttggtanttggtacaagactcgttgttacatagattgaaaaaaggcgtcggcacatgaaccttgcttaatctatagactatttgtaagagttttgataatangaangacttatanattattttttgggggaatataagacangtttgtttttgtaaataagcgaatttcttgtnaacgaacatttg

SEQ ID NO: 18544 - DNA, 391 bp, Arabidopsis thaliana
  unsure at all n locations
  Clone ID: LIB35-001-Q1-E1-H11
aaggcgacagaagggggtcgaccatttttgtttctgagttgttcttcttgattagctttgtccgcttggaaccaaacatggcgagtcttggccatatagccagagaatcatcagacatcacacgcctcgcccagttttacaaagaggtgtttgggttcgaggagatcgaaagtcctgattttggagacctacaggtggtgtggctaaacttaccaggtgcttttgcaatgcatattatccagagaaacccttcaacaaatcttccaaaaggtccttacaagtgctacctcagcggttaaggatcctanccatctcccaatgggtcatcanaacnggtttccccgtcccaaatttcgactccttccntaattctctcaagggagaaanggat

SEQ ID NO: 18545 - DNA, 390 bp, Arabidopsis thaliana
  unsure at all n locations
  Clone ID: LIB35-001-Q1-E1-H2
ctgcgagaagacgacagaatttttgaagcttctctctgcttatcgacacgatggttctcgaggcgactatgatatgtatcgacaactccgagttggatgcgaaacggagattaccctccgtctaggttacanggcgcaaacggaagctgttaancttctttgcgggagccaaaacccagtcgaatccggagaatacggtggggattttgacaatggctgggcaaaggagttanagtattgactactccnacctctgatcttgggcaaaaattctgggcctgtattgcaccggccttnnatgttgggaaagaagagatntaacttaacccgcaagctaatccaagatttgcccancctaacctcttnanncaatcccccaaaaccaaggaa

SEQ ID NO: 18546 - DNA, 404 bp, Arabidopsis thaliana
  unsure at all n locations
  Clone ID: LIB35-001-Q1-E1-H3
agaaggggatctcaacgacgacggagccaaggcttcaactttcagcggngatgaaactgctcctttcntcggattccttggcgctgccgccgctctcgttttctcctgtatgggancagcgtacgggacagcgaanagcngggttggngtagtgtcgatgggtgtgatgagaccagaccttgtgatgaaatcgattgttcctgttgttatagctggagttttangnanttatggtttgatcactgctgttatcaanagtaccggaatcaaccctaaggccaagtcttactatctattcnatggctatgctcatcnctcttccgggtcgtgcgtgtngtcnctcaggtctctncgccggtatggctattgggaantgtccgcgaagccgggtgttaganccaatg

SEQ ID NO: 18547 - DNA, 406 bp, Arabidopsis thaliana
  unsure at all n locations
  Clone ID: LIB35-001-Q1-E1-H5
ggctgcgagaagacgacagaaggggctctcgagagcagaaacagagtcaccggtaaactcatctccggcgacataaaaacacaaaagttcatatatttagattctggtgattctctgctctaatgggtcaatctcaagtttctctctttcttcttctaattcttgttttcatctatggagtttcctccaccactttcaccatcgttaaccagtgtagctacaccgtctggcctggacttctctccggcgccggaacctctcctttacctacaaccggattctccttaaaccctaccgagacacgagttatcccgattcccgcagcttggtccggtcgtatttggggtcgtactctctgcacacaagacgcaancancggaagantcacttgcatcaccgggggaat

SEQ ID NO: 18548 - DNA, 418 bp, Arabidopsis thaliana
  unsure at all n locations
  Clone ID: LIB35-001-Q1-E1-H7
naaagacgacagaaggggggttccgaagtgtgaagcatgtctgcaagttaaagatgtcctttgcccttgcatccctcgaggttgacctaagggagcatagaaccaaggaaactaccgtgacagtcaagtggcgtggaaagcccgtcttcatcaggcgaagaacagaagatgacatcaagctggccaatagtgtggatgttggatccctgagggacccacaagaagactcggttaagagtcaagaatccaagaatgggttgatcgtggttggagtatgcactcatttggggtgcatccccttgcctaatgctggtgattatggtggttggttttgtcccgtgtcacggatnacattacgatatatctggaagaattaagaaangtcctgcancatacaacctggaanttaccgacctac

SEQ ID NO: 18549 - DNA, 399 bp, Arabidopsis thaliana
  unsure at all n locations
  Clone ID: LIB35-001-Q1-E1-H8
ggctgcgagaagacgacagaagggtacggctgcgagaagacgacagaagggtacggctgcgagaagacgacagaagggtacggctgcgagaagacgacagaagggggttcttcgtcgttatcaattcggagatgattccgtttcctctgttaccaacgccgattgaaaccaactacagagcttgcaccattccttatagattcccttccgataatctcaagaaagccactcctactgaaatctcctggatcaacgtcttcgccaattccattccttctttcaagaaacgtgcagagagcgataccagtgttccagatgctcctgctagagctaaaatttttgaacaanagatatgcgggatttcctgaaaggctggaagaaaagattcaaanagtaatg

SEQ ID NO: 18550 - DNA, 402 bp, Arabidopsis thaliana
  unsure at all n locations
  Clone ID: LIB35-002-Q1-E1-C1
aagacgacagaagggggctaactcccaaaaaaaaaaatggcggcgtttttgcaaacgaacatcagtctgaatgcgatcaagatcgtcccggggaaatacagttctctcaccgatcatcagtttcgtgcgccgtatcgaattaggtgcgccgccgcttcacctgggaaaaaacggtataacatcgctctgcttcccggagacggtatcggtccagaagttatctctgttgctaagaatgtgcttcagaaagctggatctctcgaaggactggagtttgatttcaaggagatgcctgtcggaggagcagccttggatttggttggagttccattgccggaggaaactttcacggctgcaaaactatctgatgncattcttcctggagctattgganggtacaaa

SEQ ID NO: 18551 - DNA, 439 bp, Arabidopsis thaliana
  unsure at all n locations
  Clone ID: LIB35-002-Q1-E1-D1
gcgtccgtacggctgcgagaagacgacagaaggggaaaacaaaaaatggctacccgaaaagctctgatcaacgttcaccggatcattcgctccaccgccgtggttggccggagctctatcattcctgccgccgctaaccggtcatatcctattatattccggaatggagttgatttgggggcgagattcttctgtgagaacactgcgtctgcccagaatttcgatattgatctctctaacgaagagaataaganaagaacgatcaacagattgttgtataggagcaagcaaagagggtttttggaacttgatcttgttttggggaattgggttgaggagaatgttaattccatggacgaaaatggtgttaaatccctaattcatgtcctcaatttggaaaaccctgatctctggaaatggctaactgaacngaacaagc

SEQ ID NO: 18552 - DNA, 464 bp, Arabidopsis thaliana
  unsure at all n locations
  Clone ID: LIB35-002-Q1-E1-D2
cagtnccggtccagaattcacgggtcgacncacgcgtccgcccacgcgtccgcccacgcgtccgtacggctgcgagaagacgacagaaggggacccatatctcacgcttaattacagtattgccactcattaaaaccgtaccatcttaaccaaagcgataacccgtaccaccggttcagctatggaggatttattggaggagaggctaactcggactgactctgtcgggaataaacgagtcagagacgggttagacctcgactcgccggacgtgaagcggttaagagatgatttgttcgatgactcggggcttgacccagtgagtcaagatcntgactcggtgatgaagagtttcganaatgagttatccgacaacgacggcggcgctaactccggtgaaactcanccggatttgggatacttttcgaagttctatgacaactngtttgcaccgncgcttacgc

SEQ ID NO: 18553 - DNA, 372 bp, Arabidopsis thaliana
  unsure at all n locations
  Clone ID: LIB35-002-Q1-E1-E10
tggtgttnctgaaggaagacctgtcanacaacgtcgccttccttgctgtggaattggtcntggatggttcctgttcattgttggatttttccttggagcaatcccttggtatgtcggattgttcatcatgatgtttggaaggagaatcgattacagggagaaaccaaggatacattgcctgcactatcgctgctattctagcaacaatcgctgtgattctgggtgtatctaaaggagcaagacgactggtgatgggatcaatcatcttgtgggggttactccaaaaatgttttgtataggtttccttancctgtgttgtantaacctactttccttttttacntacnccaatgaagaaaccaaggaaaaaaa

SEQ ID NO: 18554 - DNA, 387 bp, Arabidopsis thaliana
  unsure at all n locations
  Clone ID: LIB35-002-Q1-E1-E2
ggctgcgagaagacgacagaagggtacggctgcgagaagacgacagaagggtacggctgcgagaagacgacagaagggtacggctgcgagaagacgacagaaggggttaatgctttgattaatgttactgagacaactatcgcttcaggagatgataaaggctgcgttaagatttgggatacaagacagcgctcttgctctcatgagtttaatgcacacgangattacatttctggcatgacctttgcatctgattcaatgaagctagtggtaacaagttggagacgggactttgtctgtctgtaatcctagaacgantangtcaatctcantccnanttctgaagatgaactactttcgttgtaaaatgaaaaatgcccntaagtt

SEQ ID NO: 18555 - DNA, 364 bp, Arabidopsis thaliana
  unsure at all n locations
  Clone ID: LIB35-002-Q1-E1-E8
agccaattgtattcatcatcatcatcgtcatcatcgttggggtgagtatacatacgattaaagaaacccaaaaactccggcgtctgtttaccgctatcatcattcttccgggaagaggaaaaggtttcttcgatcgtcgaagagattctttggacaagtcccctccttcctggttcaatcttcgattcagctctcttttaatttttttggttttgggaagctgctatgttatttgagaggcttancaagaaaccaccttcgcttgttgatctttgcgtaaggaaagcgattgataatgtaaagtacattgggatatgttggtggggttgattttcagctccntgagcagattctgcaanactgt

SEQ ID NO: 18556 - DNA, 383 bp, Arabidopsis thaliana
  unsure at all n locations
  Clone ID: LIB35-002-Q1-E1-F6
aagacgacagaagggagacacgtgaaatcggatccaatcgatgattccggcgaggaggtttctcttatctccatttgtcggcgtcacgtttatcgtcgttctcgtctctctctacttcagatcttccttcaagtctccacaacaccantatcaaaagaggttattttctgctgangaattggcattgtanaatggtactgatgaaacattacctatactcttagggattcttggatctgtgttcnatgtgacganangaaaatttcattacggtagtggagganggtacaancattttgctggaaganaccttcncgtgcatttggttctgggcaacttnacnaganatggacttacagnttcgttacagcggttaccganca

SEQ ID NO: 18557 - DNA, 460 bp, Arabidopsis thaliana
  unsure at all n locations
  Clone ID: LIB35-001-Q1-E1-C5
ttactttgccagcccgntccagtcnanaattctcgggtcnacccacgcgtccgtacggctgcgagaagacgacagaaggggaaggagaanctcaatgagagaattgcaaagctctctggtggagttgctgtgattcacgttggagcacaanctgagacagaactcaangagaanaagttganagttgaanatgctcntaatgcaacaaaggccgctgtcgaggaaggtattgttgttggtggtggttgcactctgcttcgtcttgcttccaaggttgatgccattaaagccacgcttgataatgatgaacaaaangttngagcggatataattaanagagcactaagttaccccctaaaactaatcgccaacaatgctggtgttaatggaagtntagttaccgagaangtgctttccaacgataacgttaaattcggttacaatgctgcaaccggcaant

SEQ ID NO: 18558 - DNA, 394 bp, Arabidopsis thaliana
  unsure at all n locations
  Clone ID: LIB35-001-Q1-E1-C8
aaccctaagcagcacacacnacacgggttcatcgtggaagcacagatgactttcacgcgaaggaacggtgggaggaacaagcacaacatgaggacncgtcagcccaatcagatgctccaactgtggcaagatgttgccccaaggacaaggccattaagaggttcattgtgaggaacattgtggagcaggctgctattanagatgttcaggaagctagcgtctatgagggatacacattgccgnagctatatgcaaagacgcaatactgtgtctcctgtgctatccactctcatgtcgttagagtccgttcccgcaccaaccgcaaggttcgtantcctccaactcgtttcgncagacgcnnggngggatactccccaagcctggggnaacaaga

SEQ ID NO: 18559 - DNA, 447 bp, Arabidopsis thaliana
  unsure at all n locations
  Clone ID: LIB35-001-Q1-E1-C9
gcgtccgtacggctgcgagaagacgacagaagggggctggaggctgtataaaacgcgacagtgtcgtggacatgatactctacccctctggtatctcttttccttgggttttacgatgctgacttctgtcgctttcactgctctgctcggtgcttccgcggtacttgctaccccattcacccgtacccagaggacttgtggcacacatatcagcgacgatcaggttgcccaggatgagangtatttcgangccaacagcgcttctcttgacgtcgacacggcggccaagggaaaggttccccgttctcaatgtttactggcacgtcgtccaaggccaacaagactttagagggaagccatgttccaaaagtcacaagatnaanacccaaaatcgacgtgtttnnaacaccgcccnacnntanctanttgggcctccaatgggaaggc

SEQ ID NO: 18560 - DNA, 399 bp, Arabidopsis thaliana
  unsure at all n locations
  Clone ID: LIB35-001-Q1-E1-C1
agaagggggagccttcagcttcgaggacgggctgaagcttgtaaaacttagaggagaagctatgcaggctgctgcagatgctgctaagagtgccatggttagtatcatagggttggactcagaaaaggttcagcagttgtgtgatgcagcaaatcaagaagtagatgaagctgacaaagttcagatcgcaaattacttatgtccgggtaattacgcagtatctggaggtcttaaaggaatcgaagttgttgaagccaaagctaagtcattcaaagcacgaatgacggtgcgtctagctgttgcaggtgctttccacactagtttcatggaaccagcagtctcgagattagaagctgcattggcagccacaagagatnaagaatccgaggattccantga

SEQ ID NO: 18561 - DNA, 436 bp, Arabidopsis thaliana
  unsure at all n locations
  Clone ID: LIB35-001-Q1-E1-D1
gcgtccgtacggctgcgangaagacgacagaagggcaaggaaaagaaatgggagatgcctgagaagaggcttgatttgggatggagaggaagagcttgtgtgattgagaacatattgtattgttatgattacttggggaagattagagggtatgatccaaaagagaggatttggagagagctgaaaggtgtggagtcacttccaaagtttctttgtggggctacaatggctaatcgtggtggaaagcttacggttttgtgggaaggtaaagctggtagtggtggttctagganaatggagatttggtgtgcggagattgatgttggaaggcgtggagaaagggagatttggggaaaaattgaatggtctggtaccgtgcttacggttcctaatgaatctgccattgtgaattgcctggcaactacaatttgntgat

SEQ ID NO: 18562 - DNA, 399 bp, Arabidopsis thaliana
  unsure at all n locations
  Clone ID: LIB35-001-Q1-E1-D10
agaatttttgaagcttctctctgcttatcgacacgatggttctcgaggcgactatgatatgtatcgacaactccgagtgggtgcgaaacggagattactctccgtctaggtnacaggcgcaaacggaagctgttaatcttctttgcggagccaaaacccagtcgaatccggagaatacggtggggattttgacaatggctggcaaaggagttagagtattgactactcctacctctgatcttggcaaaattctggcctgtatgcacngccttgatgtgggaggagagatcaacttaaccgcagctatccagatcgcccagctagctcttaagcatccgccaaaacaagaatcaacgccaaagatattgttttttgctggaaatccantcaggtccaaga

SEQ ID NO: 18563 - DNA, 398 bp, Arabidopsis thaliana
  unsure at all n locations
  Clone ID: LIB35-001-Q1-E1-D4
aagacgacagaaggggggagaaaaacagatcaaaatagagaaatattgaaattcgtgcgttgagagaaaaacgttgaacgatgggagccggtaatggagaaacgccaaaacctacacagatttcaatttctaaagatcaattcctcgcttggaaacgccaaaaggatgctgagttattanccaaacaagctgaagcagcaaggaaacgacaagaggacatagcttcaggtcgtgttccaatgaatggtcgtgagcttttcntgcatgagccttgggttttcgacgatactcatcattgattctgggnctantcactacttcctcataggtaacagagatnattcnnctctcattagtactgctacttgcatcccgagttttatgaaattgggacantg

SEQ ID NO: 18564 - DNA, 389 bp, Arabidopsis thaliana
  unsure at all n locations
  Clone ID: LIB35-001-Q1-E1-D5
ataccagcactaatgcaccggatcccatcagaactccgcagttaagcgtgcttgggacctcagactgagaatcgcccaagatgcagctcgcggattaacgtacctgcatgaagaaatggagtttcagataatattccgcgatttcaagtcctcgaacattcttttggatgaggactggaaagcaaagctctcagatttcggtttggctcgtttaggtccatctgaaggattaacccatgtttctactgatgttgtaggtacaatgggttatgcagcacctgaatacattcaaaccggccgtctcacatcgaaaagcgatgtgtggggttatggagtcttcctctatgagcttatcactgggaggcgaccggtggacagaaacagacccn

SEQ ID NO: 18565 - DNA, 398 bp, Arabidopsis thaliana
  unsure at all n locations
  Clone ID: LIB35-001-Q1-E1-D6
gaagggggagaacaattacttccaacggagaatggcctcaattgtcggaattcgaacaagattcctgagtttcgggaagctttcacaaatctcttcttcactgttgagaatacacaatcctcgtaatcatcagaatcctcttattctccctcttccttgtttctctgccgctcctagtcgtcatcgtcctctgatttggcttcgctcatctccgcctgtgtcctcgatgaccactcaggctgagtctgggtcttcccagcaatccgattcttccaaaacggtgagagtggtgataaagggaagagtacagggagtgtgctacagaaactggactgttgagaacgctgagcagctggggataaagggatgggttaagaacgcaaggatggttcantgga

SEQ ID NO: 18566 - DNA, 404 bp, Arabidopsis thaliana
  unsure at all n locations
  Clone ID: LIB35-001-Q1-E1-D9
agaagggggagaaaaagagatggaaagaaaaaagttttcttcaaaatttattcatttgctcattgtgtttttgcttctttgtacgtttctttctcgtaccgaatctgctcttccttatcaccatgaactgttcttggggaggaagcggatgaattattataagcccaacagtgccataggaacaccatcatcaactagtggccacgctccangcagtaatgggaggaagttgatgagtatatatagacccaatggagacatatttacaggaccatcaggcantgggcatgggtgggggtcgcactccagccccctangtatagatatatattaatgngtaatcaaaggactcacaancgaaagcttttaantcncgatnacgtntaacgtaagccttgggggta

SEQ ID NO: 18567 - DNA, 393 bp, Arabidopsis thaliana
  unsure at all n locations
  Clone ID: LIB35-001-Q1-E1-E10
cgtgggcggctcgagaagacgacagaagggtacggctgcgangaagacgacagaaggggaaacaagtcacacaacagatattcacttttgctctgaaattagctggagaaggaaatcctgttttagccaaggaagctacagcaattgctatctggtctgtgacccaaaactttgattgctgcaagcactgggacaatctctacaaggagaatctggaagctantgttgctgttcttaaaaagcttgttnaanaatgganagagcattcngtcaaactatcatcatcaccgaatgatgctctcactctcaancgaaactatgaannagcntcacgctaaaagaangnggagtcatcccctnagggaaganncaatgcctctctttacaaaagna

SEQ ID NO: 18568 - DNA, 410 bp, Arabidopsis thaliana
  unsure at all n locations
  Clone ID: LIB35-001-Q1-E1-E11
agaaggggaagaagacgaagcacactgagaattcaccggccagagatcaccaataagtgttgtagtttccggttacttcgaataaccttcaatggagcttccgttactctcgtatgctagctccgcgtcgttttcacggacaggcttatgctcttcttcttcttcctcctcaactagtatctatgagtttccggagagaagacggagtttaaaattgagattcaatggtggagaaaggtcacgaagcgttatagcttccgctgaacggagcagtgaagggattgagaagacaacagacaccgtcggtggcggaagaagangangagcaagcanatttgctggtactgccatgggaagttactacacttgatcgtgggtttgctaactccaccaccgttggatttccgatt

SEQ ID NO: 18569 - DNA, 394 bp, Arabidopsis thaliana
  unsure at all n locations
  Clone ID: LIB35-001-Q1-E1-E5
gcgtccgtacggctgcgagaagacacagaagagtacggctgcgaaaagacgacagaagagtacggctgcgagaagacgacagaagagtacggctgcgagaagacgacagaagggtacggctgcgagaanacgacagaagggtacgactgcgagaagacnacagaagggtacngctgcgataagacgacagaagggtacggctgcgagaagacgacagaagggtacggctgctagaagacgacagangggtacngctgcganaanactacagaagggtacggctgcgagaanacgacagaagggtacggctgctagaagactacagaagggtacggctgcganaagacnacagaatggtacggctgctagaanacgacagaatggtacggcttcn

SEQ ID NO: 18570 - DNA, 432 bp, Arabidopsis thaliana
  unsure at all n locations
  Clone ID: LIB35-001-Q1-E1-E9
gcgtccgggaagacgacagaagggtacggctgcgagaagacgacagaagggtacggctgcgaagaagacgacagaagggtacggctgcgagaagacgacagaagggacaaaanaaaaaaaaaaggctctaatgatgacatttaatcggaattaaattgtttcaggcatgagattgtgggcgtggtgactgaagttggagccaaagtgaaaaaattcaacgctggagacaaagtcggagttggctatatggccggctcgtgcaagtcatgtgacagctgcaatgatggcnacgaagaactactgtccaaagatgatcttaacgtccggagccaaaaactttgacgataccatgacccatgggtggatactcccgaccacatggtgtntngctgaaggattcatcatccgntatcctgacaatctcccattnaa

SEQ ID NO: 18571 - DNA, 220 bp, Arabidopsis thaliana
  unsure at all n locations
  Clone ID: LIB35-001-Q1-E1-F10
ggctgcgagaagacgacagaagggtacggctgcgagaagcgacagaagggtacggctgcgagaagacgacagaagggcaggagaaccgtgcatctatctttgtttgttatgtttctgttttcttgtcatgaaaattatgctcatgtatcttatctnnnnnnnnnnnnnnnnnnnnnnnnnnnnnnnnnnnnnnnnnnnnnnnnnnnnnnnnnnngcggcc

SEQ ID NO: 18572 - DNA, 418 bp, Arabidopsis thaliana
  unsure at all n locations
  Clone ID: LIB35-001-Q1-E1-F11
aaaagggggaaaccgttccaaaagaatcattcattgaagctccagtttccatgcttgcttctggggaagacgaaccagtgactccacaagaaggcgattatgcagctaacacacaagaggaacgacatgtttctgcagaaacagaagagaaggtaggagaaacaaaaccaaaagaatcacaaaccaacagaaaagggaaataaccaatgaagttccaagcctggagaattcaaagattgaagaagaactacagaaaaaagatgaagaatctgggaacaccaaagatttgttttcagtagtaaaagaaactgaaccaacattgaaagaacctgcaaggaaatcactatctgaccacatccaaaaaagagcctaaaaacagangaagatgagaatnatgattaaagatnatgaacataaa

SEQ ID NO: 18573 - DNA, 402 bp, Arabidopsis thaliana
  unsure at all n locations
  Clone ID: LIB35-001-Q1-E1-F2
gcccacgcgtcnggagaagacgacagaaggggacaatcggaagaaaggagaagacgaagatgtcgttggtatggttggnagcgatgttgcctctcggaatcatcggtgggatgctctgtatcatgggcaattctcagtactacatcnacaaagcttatcatgggcgtcctaaagcacatcggtcacgatgaatggggatgttgctatggaaagacgcgacacganagtcttcgagaaanctgcanctccttcctcatgattcgctttatctcttttgtgttcctcangggcttantgtgaccacttgtggtgacaantaaagtgcattcnaaagtaanaanancntgggggatntagtactttcattcccatttgattttccttgggcatattaaanctttc

SEQ ID NO: 18574 - DNA, 124 bp, Arabidopsis thaliana
  unsure at all n locations
  Clone ID: LIB35-017-Q1-E1-H9
cgggctncnaaaanacacaagaaggttacggttccaaaaagacnacaaaaggttacggttccaaaaaaacacanaaggttacggttccaaaaaancacnanaaggttacggttccaaaaaanca

SEQ ID NO: 18575 - DNA, 420 bp, Arabidopsis thaliana
  unsure at all n locations
  Clone ID: LIB35-027-Q1-E1-B7
atctctcaattctcttttgtcgatttcgcagtagaagagtcctttcgccgtctccgagaaactcgttgcagcgtcacgaccagttggagaaaatgtcttctagaggaaaaaggaaagacgaagatgtcagagcatcagatgacgaatctgaaacccacgcgccggctaagaaagtccgcaaagccagcagacgattccgaccagtctgacgatatcgtcgtctgcaacatatctaagaataggagagtctctgtaaggaattggaacgggaagatttggattgacattcgtgagttctatgtcaaggacggaaagactttgcctggcaagaaaggtatctctctaagcgtggatcagtggaacactcttcgggaaccacgcagangatatcgagaaggcctctctgacctttcntaggtt

SEQ ID NO: 18576 - DNA, 374 bp, Arabidopsis thaliana
  unsure at all n locations
  Clone ID: LIB35-016-Q1-E1-D2
gaaagaaaaacaaaatggcttcgatgggtggattacacggtgcatctccggcggttcttgaaggaagcttaaagatcaatggctccagccgtctgaatggctctggaagagtggcggtggctcaaaggtctagacttgtcgtcagagctcagcagagtgaggagacttctcgccggtccgtgattgggcttgttgctgctggtttagctggtggctcgtttgttcaggctgtcctcgccgatgctatttcgatnaaagttggccctcctccaactccttccggtggccttcctgggacagataactcagaccaagcaaaganactttgcattggcattgaaagacangttttacttacagccaattgccaccaa

SEQ ID NO: 18577 - DNA, 463 bp, Arabidopsis thaliana
  unsure at all n locations
  Clone ID: LIB35-035-Q1-E1-C1
ggtccaaaattnacgggtccacccacgcgtccgcncacgcgtccgtacggctgcgagaagacgaacagaagggtacggctgcgagaagacgacagaagggtacggctgcgagaagacgacagaagggtacggctgcgagaagacgacagaagggtacggctgcgagaagacgacagaagggtacggctgcgagaagacgacagaagggtacggctgcgagaagacgacagaagggtacggctgcnagaagacgacagaagggtacggctgcgagaagacgacagaagggtacggctgcgagaagacgacagaagggtacggttgcgagaagacgacagaagggtacggctgcnagaagacgacagaanggtacngctgcnagaagacnacagaaaggtaccgctgcnagaagacnacacaaaggtaccgctgccaaaaaaccaccagaaagggtnccgctgcc

SEQ ID NO: 18578 - DNA, 485 bp, Arabidopsis thaliana
  unsure at all n locations
  Clone ID: LIB35-039-Q1-E1-D8
gcccgntaacttctaaacaggcccgcacnnntcnnaaactcccgggtccacncacgcctcnaaacacactnctgccnacgcgtccgcccacgcgtccgtacggctgcgagaagacgacagaagggtacggctgcgagaagacgacagaagggtacggctgcgagaagacgacagaagggtacggctgcgagaagacgacagaagggtacggctgcgagaagacgacagaagggtacggctgcgagaagacgacagaagggtacggctgcgagaagacgacagaagggtacggctgcgagaagacnacanaagggtacggctgcgagaagacgacagaagggtacggctgcgagaagacgacagaanggtacggctgcganaagacgacanaanggggaagaacacaacaatggngtttcgtgganattccaaccagaaggattcctaggatttcaactcatctcactcctcagattggaggccca

SEQ ID NO: 18579 - DNA, 364 bp, Arabidopsis thaliana
  Clone ID: LIB35-006-Q1-E1-A11
gacacagaagggtacggctgcgagaagacgacagaagggtacggctgcgagaagacgacagaagggtacggctgcgagaaaacgacagaagggtacggctgcgagaagacgacagaagggtacggctgcgagaagacgacagaagggtacggctgcgagaagacgacagaagggtacggctgcgagaagacgacagaagggtacggctgcgagaagacgacagaaggatacggctgcgagaagacgacagaagggtacggctgcgagaagacgacagaagggtacggctgcgagaagacgacagaaggatacggctgcgagaagacgacagaaggatacggctgcgagaagacgacagaaggat

SEQ ID NO: 18580 - DNA, 404 bp, Arabidopsis thaliana
  unsure at all n locations
  Clone ID: LIB35-012-Q1-E1-B12
gcgtccgtacnanctgcgagaagacgacagaagggtacggctgcgagaagacgacagaagggtacggctgcgagaagacgacagaagggtacggctgcgagaagacgacagaagggtacggctgcganaagacgacagaagggtacggctgcgagaagacgacagaagggtacggctgcgagaagacgacagaagggtacggctgcnagaagacgacagaagggtacggctgcganaagacgacagaagggtacggctgcnagaagacgacagaagggtacggctgcgagaagacgacaggagggtacggctgcgagaagacgacanaagggtacggctgcgagaanacgacagaaggggttgcttctcaaaaaaaaaancntncnntncctnnnnaaaaaana

SEQ ID NO: 18581 - DNA, 458 bp, Arabidopsis thaliana
  unsure at all n locations
  Clone ID: LIB35-015-Q1-E1-F7
aactttcttcgcngactaccggtcaancntcccgggtcgacccacgcgtccgtacagctgcgagacgacaacagaagggtacggctgcgagaagacgacagaagggtacggctgcgagaagacgacagaggatacggctgcgagaagacgacagaagggtacggctgcgagaagacgacagaagggtacggctgcgagaagacgacagaagggtacggctgcgagaagacgacagaagggtacggctgcgagaagacgacagaagggtacggctgcgagaagacgacagaagggtacggctgcgagaagacgacagaagggtacggctgcnagaagacgacagaanggtacggctgcnagaagacgacagaanggtacngctgcgagaagacgacagaanggtacggctgccagaagacgacagaagggtacggcttccagaagacnacagaagggta

SEQ ID NO: 18582 - DNA, 334 bp, Arabidopsis thaliana
  unsure at all n locations
  Clone ID: LIB35-016-Q1-E1-A4
ttcaaaggtcgccccacgcgtccgcccacgcgtccgtacgacgacagaagggtacggctgcgagaagacgacagaagggtacggctgcgagaagacgacagaagggtacggctgcgagaagacgacagaagggtacggctgcgagaagacgacagaagggtacggctgcgagaagacgacagaagggtacggctgcgagaagacgacagaagggtacggctgcgagaagacgacagaagggtacggctgcgagaagacgacagaagggtacggctgcgagaagacgacagaagggtnnnnnnnnnnnnnnnnnnnnnnnnnnnnnnnngcggcc

SEQ ID NO: 18583 - DNA, 380 bp, Arabidopsis thaliana
  unsure at all n locations
  Clone ID: LIB35-028-Q1-E1-F2
gcccacgcgtccgaagacgacagaagggtacggctgcgagaagacgacagaagggtacggctgcgagaagacgacagaagggtacggctgcgagaagacgacagaagggtacggctgcgagaagacgacagaagggtacggctgcgagaagacgacagaagggtacggctgcgagaagacgacagaagggtacggctgcgagaggacgacagaagggtacggctgcgagaagacgacagaagggtacggctgcgagaagacgacagaagggtacggctgcgagaagacgacagaagggtacggctgcgagaagacgacagaagggtacggctgccaagaagacgacagaagggtacggctgcnanaagacgacagaaggg

SEQ ID NO: 18584 - DNA, 425 bp, Arabidopsis thaliana
  unsure at all n locations
  Clone ID: LIB35-042-Q1-E1-E11
gtattanacagaacggtacggctgcgagaanacgacagaagggtacggctgcgagaagacgacagaagggtacggctgcgagaagacgacagaagggtacggctgcgagaagacgacagaagggtacggctgcgagaagacgacagaagggtacggctgcgagaagacgacagaagggtacggctgcgagaagacgacagaagggtacggctgcgagaagacgacagaaggatacggctgcgagaagacgacagaagggtacggctgcgagaagacgacagaagggtacggctgcgagaagacgacagaagggtacggctgcgagaagacgacagaagggtacggctgcnagaagacgacagaagggtacngctgcnaaaagacgacagaangggacacttgacacaattctatccaaaatcaac

SEQ ID NO: 18585 - DNA, 366 bp, Arabidopsis thaliana
  unsure at all n locations
  Clone ID: LIB35-042-Q1-E1-H11
aagacgacagaagggtacggctgcgagaagacgacagaagggtacggctgcgagaagacgacagaagggtacggctgcgagaagacgacagaagggtacggctgcgagaagacgacagaagggtacggctgcgagaagacgacagaagggtacggctgcgagaagacgacagaagggtacggctgcgagaagacgacagaagggtacggctgcgagaagacgacagaagggtacggctgcgagaagacgacagaagggtacggctgcgaagaagacgacagaagggtacggctgcgagaagacgacagaagggtacggctgcganaagacgacagaagggtacggctgcagaagacgacagaangg

SEQ ID NO: 18586 - DNA, 352 bp, Arabidopsis thaliana
  unsure at all n locations
  Clone ID: LIB35-001-Q1-E1-A1
gacaaaagggtacggctgcgagaagacgacagaagtctacggctggaagacgacagaagggtacggctgcgagaagacgacagaaggatacggctgcgagaagacgacagaaggggaggggaaaggttccatgtgaacggcacttgcacatgggttagtcgatcctaaagagtcgggggaagcccgtctgatagcgcttaagcgcgaacttcgaaaggggatccggttaaaattccggaaccgggacgtgacggttgacggcaacgttagggagtccggagacgtcngcngnggcctcgggaagagttatcttttctgtttaacaacctgcccaccctggnaacgggtcaac

SEQ ID NO: 18587 - DNA, 437 bp, Arabidopsis thaliana
  unsure at all n locations
  Clone ID: LIB35-001-Q1-E1-A12
gcgtccgtacggctgcgagaagacgacagaaggggaccacataaagtaaaagtctcatctcttcataaaatagctttaaaccaatcaagtagagtttcttctcaagtctttttantttatttttatcaatggcttcttcagcagtgtctctccaatccatctctatgacaactctcaacaatctttcatgtaatcaacaatttcatcgaagctctcttcttggtccctctaaatccttcnaaaatcttggtatctcatctaacgggttcagatttcgcctatcnatcaagtttcactgncnaagaagaacctcactgcttctcgagctctctcccaaaacgggaatatcganaaccctagaacgangncaaagttcaagaactgagtgtgntncgaaatcnanngaagtagattgagacagcccaaggattcntaag

SEQ ID NO: 18588 - DNA, 436 bp, Arabidopsis thaliana
  unsure at all n locations
  Clone ID: LIB35-001-Q1-E1-A6
gcgtccgtacggctgcgagaagacgacagaaggggaccacataaagtaaaagtctcatctcttcataaaatagctttaaaccaatcaagtagagtttcttctcaagtctttttattttatttttatcaatggcttcttcagcagtgtctctccaatccatctctatgacaactctcaacaatctttcatgtaatcaacaatttcatcgaagctctcttcttggtccctctaaatccttccaaaatcttggtatctcatctaacggttcagatttctcctatccatcaagtttcactgccaagaagaacctcactgcttctcgagctctctcccaaaacgggaatatcgaaaaccctagaccaagcaaagttcaagaactgagtgtgtacgaaatcaacgaattagatngacacaagcccaagnttcttaaaaacgc

SEQ ID NO: 18589 - DNA, 393 bp, Arabidopsis thaliana
  unsure at all n locations
  Clone ID: LIB35-001-Q1-E1-B6
agaagggggcagtggtggtgggtttccgttgaagtcgtttggtgatcggaattttgcttctcatgggtttaaacctaagaatttcagtaagcctgaacccaatttctctcaggatctggattatgatgatgagtttgatgatgatagagcagagagggaaggattcaacccgaggattcaaagttctaggagctcttcgcgggtgaatggctacagcangaaggatgggagctatcctcgaaacactggtgcttccaatggctatggatcgtcttctaggttcaagcatgagcaaatgaatgcagcaagcagaagttgagtctgacccgatcgatgaagttgtttcttctgttaagatgttgacagaaatgtttgtganggtggagaattcga

SEQ ID NO: 18590 - DNA, 349 bp, Arabidopsis thaliana
  Clone ID: LIB146-011-Q1-E1-B7
ccactaagctcctcctctctatcccaccacttctaaagctggctggtgagctctctctgagtgtcaagtctgtgaagtacactcgcggctccttcctctgccccggaggccagccttttcctcaccgcagcttctctgaagaagtctctgttcttgatgggcactttactcagctgggcttgaacagcgtagcctacttgatgggcaatgatgatgagactaagaaatggcatgtctatgctgcctctgcccaggactccagcaactgcaacaacaatgtctacactctcgagatgtgcatgactggtctggacagagagaaagctgctgtcttctacaaggatgaacc

SEQ ID NO: 18591 - DNA, 381 bp, Arabidopsis thaliana
  Clone ID: LIB146-025-Q1-E1-C5
tttctctcaaatttagggttttctcttttctcgaaagtcttgcggttttctgaatcatctctatctggtttgagggtttcgtttgatatctggagaaaggggtttctggaaacaaggagttcataattcgcgatcttgatctatcgatcttcatttatatataaaagcgtgaatgagattatgatggagtcgaaaggtggtaaaaagaagtccagcagtagtagttccttattttacgaagctcccctcggttacagcattgaagacgttcgtccaaacggtggaatcaagaaattcaaatcttctgtctactcaaactgctccaagaggccatcctgagtaccagcgtgcaccgatcttcataatatagttatagctttc

SEQ ID NO: 18592 - DNA, 210 bp, Arabidopsis thaliana
  Clone ID: LIB146-002-Q1-E1-C1
tctctctttcttctctatcgctttcatttttctcctccagatctcgattccaatctctctctcgctctctacttccttcaacagaaatggaaacgttcctatttacctctgaatccgtcaatgaaggacacccagacaagctttgtgaccagatttctgatgcgatccttgatgcttgcttagagcaggatcctgaaagcaaagtggcgt

SEQ ID NO: 18593 - DNA, 355 bp, Arabidopsis thaliana
  Clone ID: LIB146-015-Q1-E1-H7
acttaaagaaatgcttgagtttcacaaatctcacggtggggaagcctccataatggtaacaaaggtggatgaaccgtcgaaatatggagtggttgttatggaagaaagcactggaagagtggagaagtttgtggaaaagccaaaactgtatgtaggtaacaagatcaacgctgggatttatcttctgaacccatctgttcttgataagattgagctaagaccgacttcaatcgaaaaagagactttccctaacattgcagcagcgcaagggctctatgctatggtgctaccagggttttggatggacattgggcaaccccgtgactacataacgggtttgagactctacttagac

SEQ ID NO: 18594 - DNA, 405 bp, Arabidopsis thaliana
  Clone ID: LIB146-010-Q1-E1-F7
aacttccccacttccaaccaaaattaatttaaaatgtcaaatattttttcattttcctcttttcgaaattaaagaaaaccctaaacgccgttgtctgatattgagagagagagagagagattaaaaacttcttctggttccttttatcaacattttttctctctcttaaaacttcgaagcgatttttgatttacagactatggaaatggaatcattcatggacgaccttttgaacttctctgtaccggaagaggaagaagacgacgacgaacatacgcaaccaccgaggaatattactcgccggaaaactggattacggccaacagactccttcggtctctttaataccgacgaccttggagtggttgaagaagaggatttggaatggatttcaaacaaaaatgc

SEQ ID NO: 18595 - DNA, 418 bp, Arabidopsis thaliana
  Clone ID: LIB146-026-Q1-K1-B5
ctcccttactaaatttccttctctaatctctactttgtccaaaagcatttaactttaacgggaaaaatcttatatttgtttcctcctggatctctctctctatatctgcagattcacactacagctgatttagatctatttcgtaagtgggtctttcaaagtcgtctcctttgatctactttgattcaagggtcgttgatttggtgataagtcagtagaaatggataaggagaaatctccagcacctccttgtggaggtcttcctcctccatctccatcaggtcgatgctctgcattctcagaagctggtcccattggtcatggttcagatgctaatcgaatgagtcatgatattagccgtatgcttgataacccacctaagaagattggacatcggcgagctcattctgaaatactt

SEQ ID NO: 18596 - DNA, 358 bp, Arabidopsis thaliana
  Clone ID: LIB146-012-Q1-E1-C11
agctctctttcccagcatcaccatctcttgtaccagtttctgattagattcaacaatgaacggcgcattaggtaactcctccgcctccgttagtggcggagaaggagccggaggaccagcgcctttcttggtgaaaacctacgagatggtcgacgattcatcaacggaccagatcgtatcgtggagcgctaacaacaacagcttcatcgtttggaatcatgccgaattttcacgcctccttcttccaacctacttcaaacacaataacttctcttccttcattcgtcagctcaatacctatgggtttaggaagattgatccagagaggtgggagtttttgaatgatgattttattaag

SEQ ID NO: 18597 - DNA, 371 bp, Arabidopsis thaliana
  Clone ID: LIB146-026-Q1-K1-G11
gatgaaactaccaaagattgtactgcttatttttgtgtcaggaaagattgatataactggagccaagatgagagaagagacttatgccgcataagagaatatctacccagttcttagagaattcatgaaggtccagtaataatagtatatacgaccatagtgaaggcaaaaaccatgttcacgtgtgaattggcatgaactagagatctcgggtgttggcaggcgcttggtggggtgagtattccttggacaagaacttgaaattattcagattcaaaaccagaaattgtaaatagataatggagatgccaataaatctcttttcttttttggtctaaaaatgtcttccaagtaatcttggttcatggtct

SEQ ID NO: 18598 - DNA, 380 bp, Arabidopsis thaliana
  Clone ID: LIB146-012-Q1-E1-G4
ccaacttcttctttcaccagaatcgaaacgaaagaagatttgatgaacgacgccgttttcattgagccgtggcttaaacgcaaacgctccaaacgtcagcgttctcacagcccttcttcgtcttcttcctcaccgcctcgatctcgacccaaatcccagaatcaagatcttacggaagaagagtatctcgctctttgtctcctcatgctcgctaaagatcaaccgtcgcaaacgcgatttcatcaacagtcgcaatcgttaacgccgccgccagaatcaaagaaccttccgtacaagtgtaacgtctgtgaaaaagcgtttccctcccaacaaggctttaagcggtcacaaagcaagtcaccgaatcaaaccaccaaccg

SEQ ID NO: 18599 - DNA, 408 bp, Arabidopsis thaliana
  Clone ID: LIB146-009-Q1-E1-A1
attaaaatggctgctcgtgtcgaggcggcagcaacacacttgtcgtctctccctgtagcttctctggagttttcgcagtcacgaatcttgttttgaagaaattaatttgaacaagggttttagggcttggatgctttgttttcattgaagaagaagtagaaggagtgtatacaaggattatgggaactcacatcaatttcaacaacttaggaggtggtggtcatcctggaggggaagggagtagtaaccagatgaagccaacgggtagtgtcatgcccttggctaggcagtcctcggtctactcccttacctttgatgagttacagaacacactaggtggaccgggaaaagattttgggtccatgaacatggatgaactcctgaagagcaatatgactgctgaagaaa

SEQ ID NO: 18600 - DNA, 399 bp, Arabidopsis thaliana
  Clone ID: LIB146-013-Q1-E1-D8
aggttttttttttgttcctttcttaaatttcgaaagaaagacatttattaaaccaaaataactctttagatcattgcaaggaaaaatgttgaaaagtgcaagtccaatggcattctacgatatcggagagcagcaatactctactttcgggtacattttaagcaaacctgggaacgcaggagcttacgagattgacccttcgatcccaaacatcgacgatgcgatctacggctcagatgagttccgtatgtacgcttacaaaatcaaacggtgtcctcgtactcgtagccacgactggacggagtgtccctacgctcaccgtggcgagaaagccacacgccgtgatcctcgccgttacacttactgtgcagtcgcatgcccggctttccgaaatggcgc

SEQ ID NO: 18601 - DNA, 308 bp, Arabidopsis thaliana
  Clone ID: LIB146-008-Q1-E1-B9
taaatttcgaaagaaagacatttattaaaccaaaataacgctttatataattgcaaggaaaaatgttgaagaatggaattcgaagggcattctacgatatcggaaagcagcaatactctactttcgggtacaatttaagcaaacctgggaatgcaggagcttacgacattgacccttcgatctgaaacatcgacgatgcgatatacggctcatatgacttccgtatgtacgcttacaaaatcaaacggtgtcctcgtactcgtacttacgactggacgagatgtcactaccatcatcgtgacgagaaa

SEQ ID NO: 18602 - DNA, 381 bp, Arabidopsis thaliana
  Clone ID: LIB146-018-Q1-E1-B9
ctctcaaatttagggttttctcttttcacgaaagtcttgcggttttctgaatcatctctatctggtttgagggtttcgtttgatatctggagaaaggggtttctggaaacaatgagttcagaattcgcgatcttgatctatcgatcttcatttatataataaaacgtgaatgagattatgatggagtcgaaaggtggtaaaaagaagtccagcagtagtagttccttaatttacgaagctcccctcggttacagcattgaagacgttcgtccaaacggtggaatcaagaaattcaaatcttctgtctactcaaactgctccaagaggccatcctgagtaccagcgtgcaccgatcttcataatatagttatagctttcttt

SEQ ID NO: 18603 - DNA, 391 bp, Arabidopsis thaliana
  Clone ID: LIB146-010-Q1-E1-F5
ggaaaactctggtggtgccccggtaatccggcgactaccatcaggatgtgtggtgcaggatgtgtctaatggatactctaaggtcacgtgggtggagcatgcagaatacgacgagaaccaaatccaccagctgtacaggccgttgctacggtcaggccttggttttggctctcaaagatggctcgctacacttcagagacagtgcgagtgtctcgccatcctcatgtcttcctccgttacatctcacgacaacacatcaataacgcctggtggtcgaaaaagcatgctgaagttagctcaacgcatgacgttcaacttctgttcgggaatctcggcgccgtcggtccacaattggagcaagctcactgttggaaatgttgacccggacgtt

SEQ ID NO: 18604 - DNA, 404 bp, Arabidopsis thaliana
  unsure at all n locations
  Clone ID: LIB146-002-Q1-E1-G7
aancgtccgaaataacaaaatggctcgagtctcttctcttctttctttcttcttaacacttttgatccttttccatggctacgcggctcaacagggtcagcagggtcagcagtttccgaacgagtgccagctcgaccagctcaatgcgctcgagccgtcacacgtactgaagagcgaggctggtcgcatcgaggtgtgggaccaccacgctcctcagctccgttgctcaggtgtctcctttgcacgttacatcatcgagtctaagggtctctacttgccctcnttctttaacaccgcgaagctctctttcgtggctaanggacgaggtcttatgggaaaagtgatccctggatgcgccgnaacattccanngactcatcagagtttcaagcatngcttcgagag

SEQ ID NO: 18605 - DNA, 409 bp, Arabidopsis thaliana
  unsure at all n locations
  Clone ID: LIB146-002-Q1-E1-H1
aancgtccaaagaaaaatgggtcgagtctcatctattatctctttctctttgacactcttgatcctcttcaatggctacactgcccaacagtggcccaacgagtgccagctcgatcaactcaatgcgctcgaaccatcccaaatcatcaagagcgagggtggtcgcatcgaggtctgggaccaccatgcaccccagctccgttgctccggctttgcctttgaagcgtttcgtcattgagcctcagggtcttttcttgcccactttcttgaacgccggcaaactcacgtttgttgttcacggaangggtctaatgggaagaagttattccggggatgcgccgagacgttcatggagtcaccggtatttgganaangtcaaggtcagggtcanagtcaanggttccgtgag

SEQ ID NO: 18606 - DNA, 453 bp, Arabidopsis thaliana
  unsure at all n locations
  Clone ID: LIB146-002-Q1-E1-H3
ttggtgggtcctgcgccacntatccggaaagcccgggtcnacccaaacgtccngtttcacctctaatgcgacgaacacagccacgggaactggccgtcactggtttatcggagaatctccaaggatgtgttttccgcacggtgaaacgagcagttctgatcggaaacggctgcgccggcgcggagaatcaatgcatcggtctccttcgatccttaggcctcttcgatcgccacctctattatagagtagctaaaccaagaggtggaatccttcaatggcttcctatctctctctacaaacgaattcatcgttttatcangcactatctgtgccgggattatccattaacgctactggaatcacgaatgtgtttgaagtagatgatgcgaagcanattgctgctatggctcgtaaaacgtttgaaanagaatggcccgttgttaagtcgtggcg

SEQ ID NO: 18607 - DNA, 65 bp, Arabidopsis thaliana
  unsure at all n locations
  Clone ID: LIB146-002-Q1-E1-H5
gaanagaaccctatgacgggagtgcaanagagaacctgagatccgatgcnaacaatcaggtcgac

SEQ ID NO: 18608 - DNA, 95 bp, Arabidopsis thaliana
  unsure at all n locations
  Clone ID: LIB146-002-Q1-E1-H6
atctcaanaccggttccagtcaaattcccgttgtccaantgtgttcgtctcgtgctcactgaatcagccttctgcngatgcttccgacnccgccc

SEQ ID NO: 18609 - DNA, 403 bp, Arabidopsis thaliana
  unsure at all n locations
  Clone ID: LIB146-002-Q1-E1-H7
aancgtccgctttacaatcagtcttgaaattcgaattgantgaatttacaacctccagctaccttggcatttatcttcaggagaacattggtgagatactgatcgttcagtctggtgggagcaatgcactgagtcacaattccaanatcaacaagattcttttttttccaagggcctaaaaaatttcagacacatganaagttaaacatttacattcaagggggaaaacaggccatattcancaatgtnaaggtgtgantgtgatgtaccatanacatcagagtttttcctttcagcgaggtatgcaangaaggaacagangcggctttggggagtttgganttanctgctcaanacatattctcnactnctcacagtnaactgggngcattccctaanctga

SEQ ID NO: 18610 - DNA, 475 bp, Arabidopsis thaliana
  unsure at all n locations
  Clone ID: LIB146-002-Q1-E1-H8
nnnnggtctttnagncccaaaatgncatantccggangtcccgggacgacccaaacgtccgcaaaaatggagttgataaacgactttctcaacctaactgctcctttcttcaccttctttggtctctgcttcttcttgcctcctttttacttcttcaagttcttgcagtctattttctcgacaattttctctgaaaatctttacggggaaagttgttctcatcactggtgcttcctccggtatangcgagcanttggcatatgagtacgcatgtagangtgcatgtttaagccctgaccgcccgaaggaagaaccgtctagaggaagtggcaagaggattgcccgtgaactcgggattctcccaatgttggtcaaccgttcatgccgaatgtctccaaaacctgatgactggtggacgaatccgttgatgacancaatcacccaattttgggcaagaattgggattcatcctngt

SEQ ID NO: 18611 - DNA, 52 bp, Arabidopsis thaliana
  unsure at all n locations
  Clone ID: LIB146-002-Q1-E1-H9
ctttacttgcccatcttcttcacttccccntaagatttcctacntcgtttca

SEQ ID NO: 18612 - DNA, 348 bp, Arabidopsis thaliana
  unsure at all n locations
  Clone ID: LIB146-026-Q1-K1-G12
ctgcctcctttcgatttcaaatctcagatctagctcaacaatggcgttgctcgtcgagaagacctcgggtggccgtgaatacaaggtcaaatgcatgtctcaagccgagggcggtcgtctcgaactggagctagcggatgttgagatggatagactcatgagtgggcgtaccgaattggggcgctgagcagggcatgcaaaggcgctagaatcaccggatctcttcacatgacgaaccagaccgncgtactcatcgaagccctaactgctctcggggcagaggtcagatggtggtcctggaacatgtggtccactcaagaccacgccggcggaaccatcgctcgggac

SEQ ID NO: 18613 - DNA, 340 bp, Arabidopsis thaliana
  Clone ID: LIB146-014-Q1-E1-E3
agacctcaagtggccgtgaatacaaggtcaaagacatgtctcaagccgatttcggtcgtctcgagctcgagctcgccgaagttgagatgcctggactcatggcttgtcgtaccgaattcggaccttctcagccattcaaaggcgctagaatcaccggatctcttcacatgacgatccaaaccgccgtactcatcgaaaccctaactgctctcggtgctgaagtcagatggtgttcctgcaacatcttctccactcaagaccacgccgccgcagccatcgctcgtgactccgccgctgttttcgcctggaaaggtgagactcttcaggagtactggtggtg

SEQ ID NO: 18614 - DNA, 399 bp, Arabidopsis thaliana
  unsure at all n locations
  Clone ID: LIB146-028-Q1-K1-D1
ctccatggctagaggaaatgcctctgagcctgccatggaaatgaccaagaggttcgacaggaactaccattacatcgtccctgagtagggccctgaggtcaacttctcttacgcatcccacaaggccgagaatgagtacaaggaggccaaggctcttggagttgacaccgtccctgtacttgttggtccagtctcttacttgctgctttccaaggctgccaagggagttgacaagtcattcgaacttctttctcttctccctaaaattctcccgatctacaaggaagtgattacggagcttaaggcagctggagccacctggattcagcttgacgagcctagccttgntatggatcttgagaggcagaaactccaggcctttactggagcctatgctga

SEQ ID NO: 18615 - DNA, 405 bp, Arabidopsis thaliana
  Clone ID: LIB146-019-Q1-E1-D1
cggacgcgtgggtttccttcttcctctccgattcttcctccgtcagtaaaagaaaatcaaaatggcttcacacattgttggatacccacgtatgggccctaagagagagctcaagtttgcattggaatctttctgggatggtaagagcactgctgaggatcttcagaaggtgtctgctgatctcaggtcatccatctggaaacagatgtctgccgctgggactaagttcatccctagcaacacctttgctcactacgaccaggttcttgacaccaccgccatgctcggtgctgttccacctaggtatggatacactggtggtgagatcggccttgatgtttacttctccatggctagaggaaatgcctctgtgcctgccatggaaatgaccaagtggttcgacac

SEQ ID NO: 18616 - DNA, 388 bp, Arabidopsis thaliana
  Clone ID: LIB146-010-Q1-E1-H9
ctgcccaaaaggccgttgaattgaatgcattggccaaggctttggctggccaaaaggacaaggcccttttctctgccaatgctgcggctttggcttcaaggagatcttccccaagagtcaccaacgagggtgtccagaaggctgctgctgctttgaagggatctgaccaccgtcgtgcaaccaatgttagtgctaggctagatgctcagcagaagaagctcaatctcccaatcctaccaaccacaaccatcggatccttcccacagactgtagagctcaggagagttcgtcgtgagtacaaggccaaaaaggtctctgaggaggactacgttaaggccatcaaggaagagatcaagaaagttgttgacctccaagaggaacttgacat

SEQ ID NO: 18617 - DNA, 340 bp, Arabidopsis thaliana
  Clone ID: LIB146-029-Q1-K1-H6
cataaagagagagaagagaacgagagaatcattgagaaacgaaacaacaatggccgtctcatcattccagtgccctaccatcttctcctgctgctcaatctccggctttcaatgccgttctgatccagatctcgtcggttctcccgtcggtggatcatctcgccgtcgtgtccatgccttcgccgggatttcttcctcattcaccggggacgctggattatcctccaggatcttaagatttcctcctaatttcgtccgtcagctgagcattaaagcccgtagaaactgtagcaacatcggtgttgcacagatcgtggcggctaagtggtcctacaaccca

SEQ ID NO: 18618 - DNA, 304 bp, Arabidopsis thaliana
  unsure at all n locations
  Clone ID: LIB146-002-Q1-E1-G5
ntggtggtcntngtgncctaaatgtaattatccggaagtcccgggtngacccaaacgtccgaggcggccaacaaccacatgaaatagctaatggtttagaggagactttgtgcaccatgcgatgcactgaaaacctcgatgacccgtcggatgctgacgtgtacaagccatcactcggatacattancacacttaacagctacaatcttcctatcctcaagacttctcggccttagcgctcttcgttggntccatccgtaaaangcctttgnggttacgcgcatnggganctnaaacncannac

SEQ ID NO: 18619 - DNA, 423 bp, Arabidopsis thaliana
  Clone ID: LIB146-026-Q1-K1-D6
aatttctcattgagaaactgttcaatataaaaataaaatataatcaaaaagtatgagagagagtagaattagtctctcaagtgagaaactttgagaaacccataagaacacttgtatatcaggtcaaatattattttattgttaaaatttaattatataactaatatttattaaaatactaatattttttttttttgagaaaccaagaaggtatctcagtgacggagatgtccttatatcataccaaacttcaacaaaaacaagtattggagtcgactgtgtgataggttcgtcctcatccaaagacatagcttgaaggactttttgatataattatgtgtttggtgtgtataggtgtggtgatgagtgcaaggatgcaagaaagcaaaaagggtatattattgaagccaaagacatgcaata

SEQ ID NO: 18620 - DNA, 367 bp, Arabidopsis thaliana
  Clone ID: LIB146-008-Q1-E1-D3
aaagttctagaatttttttgcattattaatagacttttaagtttcactctttattcgaactttgagatagataaccaaacattagcattagcattaattttctctggaccatgaataaggttgagaggtcaaactattacttggactaaatcaatatgatggcatctccatcagtgagatactttcttggcttatcaaaataaatagatatgtgtattttaataaatatgagttataaaattaagattttaatagtaacataagatttgaccaatatatgagatgcaagtattttcatgggtttctcaaagtttcccacttggaagactaattctactctctttcagactttttgattaaattttat

SEQ ID NO: 18621 - DNA, 291 bp, Arabidopsis thaliana
  Clone ID: LIB146-014-Q1-E1-C2
tctcaaatttagggttttctcttttctcgaaagtcttgcggttttctgaatcatctctatctggtttgagggtttcgtttgatatctggagaaaggggtttctggaaacaaggagttcataattcgcgatcttgatctatcgatcttcatttatatataaaagcgtgaatgagattatgatggagtctaaaggtggtaaaaagaagtccagcagtagtagttccttattttacgaagctcccctcggttaaaacatttaaaaagttcgttcaaaacggtgaaatcaagaaa

SEQ ID NO: 18622 - DNA, 314 bp, Arabidopsis thaliana
  Clone ID: LIB146-029-Q1-K1-H10
caaactcgtttgctcttttcatcattactaaatcataagcgtctctcaagttctttagggtttcgagttttatcaatctcctacctgattaaggttaatttcttatcttggatcaataacaagagaattctaactccggattgtaatcaatattcctctacataaaaagcgtgaatgagattatgatggaatcgaaagctggtaataagaagtcaagcagcaatagttccttatgttacgaagcaccccttggttacagcattgaagacgttcgtcctttcggtggaatcaagaaattcaaatcttctgtctac

SEQ ID NO: 18623 - DNA, 338 bp, Arabidopsis thaliana
  Clone ID: LIB146-025-Q1-E1-C6
cgtttctctcacatttagggttttctcttttctcgaaagtcttgcggttttctgaatcatctctatctggtttgagggttgcgtttgatatctggagaaaggggtttctggaaacaaggagttcataattcgcgatcttgatctatcgatggtcatttatatataaaagccgtaatgacattatgatggagtcgaaaggtggtaaaacgaactccagcagtactagttccttattttacgaagctcccctcggttacaccattgaagacgttcgtccaaacggtggaatcaccacattcaaatcttctgtctactcaaactgctccacgaggccatcc

SEQ ID NO: 18624 - DNA, 455 bp, Arabidopsis thaliana
  unsure at all n locations
  Clone ID: LIB146-002-Q1-E1-D7
gnntntttggtgnccctgcaggtaanagtccggaantcccgggtcgacccaancgtccgacacacatagcaaaaaatggcaaacaagttgttcctcgtctgcgcagctctcgctctctgcttcctcctcaccaacgcttccatctaccgcaccgtcgttgagttcgaagaagatgacgccactaaccccataggcccaaaaatgaggaaatgccgcaaggagtttcagaaagaacaacacctaagagcttgccagcaattgatgctccagcaagcaaggcaaggccgtagcgatgagtttgatttcgaagacgacatggagaacccacagggacaacagcaggaacaacagctattccagcagtgctgcaacgagcttcgccaggaagagccagattgtgtttgccccaccttgaaacaagctgccaaggccgttagactccagggacagcaanc

SEQ ID NO: 18625 - DNA, 401 bp, Arabidopsis thaliana
  Clone ID: LIB146-002-Q1-E1-D8
aagcgtccggaagaaaaatgggtcgagtctcatctattatctctttctctttgacactcttgatcctcttcaatggctacactgcccaacagtggcccaacgagtgccagctcgatcaactcaatgcgctcgaaccatcccaaatcatcaagagcgagggtggtcgcatcgaggtctgggaccaccatgcaccccagctccgttgctccggctttgcctttgagcgtttcgtcattgagcctcagggtcttttcttgcccactttcttgaacgccggcaaactcacgtttgttgttcacggaaggggtctaatgggaagagttattccgggatgcgccgagacgttcatggagtcaccggtatttggagaaggtcaaggtcagggtcagagtcaagggttc

SEQ ID NO: 18626 - DNA, 408 bp, Arabidopsis thaliana
  unsure at all n locations
  Clone ID: LIB146-002-Q1-E1-D9
aancgtccgcaaaaatactcatatggctagcttctccacagcacaacctctctctctgccacgtcatccaaacttcttcaatccgaatcaaccaactaccaataacgaacgctcccgccacatttctctgatcgaccgatgtgtgtctctccgacaactaaagcaaacccatggtcacatgatccgtaccggtacgttttccgatccttactcagctagcaagctattccgcaatggcagcgctctcttccttcgctagtctcgagtatgcacgcaaggtgtttgatgaaattcctaaaccaaattctttcgcttggaatactcttatccgtgcttacgcttctggaccaagaccctgttcttaagcatctgggctttcttgggatatggtttcggagagtcagtgtt

SEQ ID NO: 18627 - DNA, 360 bp, Arabidopsis thaliana
  unsure at all n locations
  Clone ID: LIB146-002-Q1-E1-E1
tggtngnnctgcgccnacanagtccggaaantcccgggnccacccaancgtccncgttggtgggatggagatggcatgaccactggatctattgggtcggaccattcatcggtagtgctttagccgcccttatatatgagtacatggtcatacccaccgaaccacctacccaccacgcacatggtgtacaccagcccttggcccctgaagattactagatggaactttcctcatgtcaccactgcttttgttcgttgttcaagctctctttgtctgtatgatgagatcacttgcatagatactttttttcttatgctactcttatgttgtaataataaaaaataaagaacgatttcgcaa

SEQ ID NO: 18628 - DNA, 65 bp, Arabidopsis thaliana
  unsure at all n locations
  Clone ID: LIB146-002-Q1-E1-E10
ggtgtttccgttgcncgttatgtnatttaacaaggcggtctttacttgcccaccttcttcanttc

SEQ ID NO: 18629 - DNA, 467 bp, Arabidopsis thaliana
  unsure at all n locations
  Clone ID: LIB146-002-Q1-E1-E12
tggtngcnttggtgcccnnacaggtacaagcccggaantcccggancgacccaancgtccgacacacatagcaaaaantggcaaacaagttgttcctcgtctgcgcaagctctcgctctctgcttcctcctcaccaacgcttccatctaccgcaccgtcgttgagttcgaagaagatgacgccactaaccccataggcccaaaaatgaggaaatgccgcaaggagtttcagaaagaacaacacctaagagcttgccagcaattgatgctccaagcaagcaaggcaaggncgtatcgatgagtttgatttcgaaagacgacatggagaacccacagggacaacagcaggaacaacagctattccaagcagtgntgcaacgagcttcgccangaagagccagattgtgtttggcccaccntgnaacaangctgccaaangncgtntactccanggacaggacccaacca

SEQ ID NO: 18630 - DNA, 407 bp, Arabidopsis thaliana
  unsure at all n locations
  Clone ID: LIB146-002-Q1-E1-E2
cnnnggtcnanncaattcnctacagtgaagtcgtattatatgcataagcttttgttttctcttctctccgtcgtctcactctcatttctcctcttcttccatggcgccgangcacgccagcgagaggcgccgtttccaaacgcctgccatttcagccaantcaacagcctcgcgcccgctcaggcgacgaanttctaagccggtcagatggaagtatgggaccacatgagccctgagctccgatgcgccggtgtaacggtggctcgcatcacccttcancccaantccattttcttgcccgctttctttagcccaacctgcccttgcntacgttgtccanggagaaggagttanggggacgantgcttccgggttgtcttgagactttttgaanngagntaaccgat

SEQ ID NO: 18631 - DNA, 405 bp, Arabidopsis thaliana
  unsure at all n locations
  Clone ID: LIB146-002-Q1-E1-E8
aagcgtccggggtggtcgcatcgaggtctgggaccaccatgcaccccagctccgttgctccggctttgcctttgagcgtttcgtcattgagcctcagggtcttttcttgcccactttcttgaacgccggcaaactcacgtttgttgttcacggaaggggtctaatgggaagagttattccgggatgcgccgagacgttcatggagtcaccggtatttggagaaggtcaaggtcagggtcagagtcaagggttccgtgacatgcaccangaaagtagagcacctacggtgcggtgacaccattgcaacaccatctggtgtagctcaatggttctacaacaatggaaatgagcctctcattcttgttgcagccgcggatctcgccagcaancagaaccaagcttgag

SEQ ID NO: 18632 - DNA, 404 bp, Arabidopsis thaliana
  unsure at all n locations
  Clone ID: LIB146-002-Q1-E1-E9
aancgtccgaaagaggaagaaaaatgggtcgagtctcatctattatctctttctctttgacactcttgatcctcttcaatggctacactgcccaacagtggcccaacgagtgccagctcgatcaactcaatgcgctcgaaccatcccaaatcatcaagagcgagggtggtcgcatcgaggtctgggaccaccatgcaccccagctccgttgctccggctttgcctttgagcgtttcgtcattgagcctcagggtcttttcttgcccactttcttgaacgccggcaaactcacgtttgttgttcacggaaggggtctaatggggaagagttattccgggatgcgccgagacgttnatggagtcaccggtatttggagaaaggncaagtcanggtccagantcaag

SEQ ID NO: 18633 - DNA, 96 bp, Arabidopsis thaliana
  unsure at all n locations
  Clone ID: LIB146-002-Q1-E1-F1
tganatattgcttgtcttcctccttcgttccggncaacttgtgaccantcttacgcatcgatgcgnggtggaatccgtgggatcattcccggcaca

SEQ ID NO: 18634 - DNA, 460 bp, Arabidopsis thaliana
  unsure at all n locations
  Clone ID: LIB146-002-Q1-E1-F6
tanntgncntggtgnccctanaaggtaanagtccggaantcccgggtngacccaagcgtccgatcatctcccatggctctctgaatttgatcctcaaagaatccggtctagatgctctaatctcgtcccaaaagtaaaccggtttgtgaaccggattatctctgaccaccgtgaacaaactcgtgactcaccgagtgacttcgttgacgtattgctctctctcgatggtcctgataaattatccgaccctgatatcatcgccgttctatgggaaatgatattcagaggaactgacacggtggctgttttgatcgagtggattcttgctaangatggtccttcatccanatattcaatcgacggttcacaatgagcttgatcaaatcgtgggacgatcaagggctgtcgaagaagtctgacgtggtgtctctangtatatctaacgggctgtggtgaaagg

SEQ ID NO: 18635 - DNA, 406 bp, Arabidopsis thaliana
  Clone ID: LIB146-002-Q1-E1-F8
aagcgtccgaaacaagacccatcgataacagcgatcatggtggctaaagccttagcacagctgataacatgcatcatcttattctgccacgttgtagcttccgtagaagacctcaccatacgccaagtcacggccgacaatcggcgaattcgcccgaatcttctcgggactcacacagagagtaaattccggcttttcatgtccgattacggcaagaactactccacgagggaggagtacatccaccgcctcggaatatttgccaaaaacgtccttaaggccgcagagcaccagatgatggacccctccgccgtccacggagtcacacagttctctgacctcacggaagaggagttcaagcggatgtacactggagtagccgatgttggcggcagccgtggcggta

SEQ ID NO: 18636 - DNA, 457 bp, Arabidopsis thaliana
  unsure at all n locations
  Clone ID: LIB146-002-Q1-E1-F9
ggnnnncnttggtgncccnacaggtacatagtccggaantcccggggttgaanaanaaaanagttccgaccgttgtttcgaactaccagaaggacgatggagcggaggatcccgtcngntgtggacggaattgcctcggcgcttgttgccttaacggggctaggcttccattgtatgcatgtaanaatctggtaaaatccggagaagaagcttgtaatcagtcatgaggctatagagcctcctgtagcttttctcgagtcccttgttctcggagagtgggangatangttccaaagtggactttttcgctatgatgtcactgcctgcgaaaccaaagttatcccggggaagtatggtttcgttgctcancttaacgagggtcntcacttgaagaagaagccaactgaagttccgtgtagataangtgttgcaagtcttttgatggcancaaattcaa

SEQ ID NO: 18637 - DNA, 336 bp, Arabidopsis thaliana
  unsure at all n locations
  Clone ID: LIB146-002-Q1-E1-G1
aanggtccaaagaaagcagcacgaacaccaactcttaaggaaaacatctaagttatgggttaagtaattgcatgcaatttaaagctacgtgtccagcttaagacactcaagtctcacatctgtccctttttacttcgacttcgcttcttttggcttcttttaaactctctctatctctctctttcttcttcacactttgttgttaatttcaagtgtttgatcataatgggaacatcagctcgtangcatnaggggttccgganagcccaatgacggganacaacccgggngtccantacagccnnnttgggcngannttntccccgcagtttnggc

SEQ ID NO: 18638 - DNA, 413 bp, Arabidopsis thaliana
  unsure at all n locations
  Clone ID: LIB146-002-Q1-E1-D6
aagcgtccgatcctccaccangaacagtatccaccgccgattaagaagtatcctccaccagaacagtatccaccgccgattaagaagtatcctccaccagaacagtattcaccgcctttcaagaagtatcctccgccagaacagtatccaccaccgatcaagaagtatcctccgccagaacattatccaccgccgataaaaaagtatccnccgcaagaacagtatccancancgattaaaaagtatcctccgccagaaaagtatccacccccgatcaagaagtatcctccgccaagaacagtatccaccgccgatcaagaagtatcctccgccaantaaggaagtatcctccggcgagaaggagtntccaccaccggattcangacttancnncatccccctgtgaagtttcc

SEQ ID NO: 18639 - DNA, 87 bp, Arabidopsis thaliana
  unsure at all n locations
  Clone ID: LIB146-002-Q1-E1-G10
ngcaggcagcacnncaccgtaccggtttcaggtcgggggtgggaattttccggttggtgggttaagtccgttgagtgaaagctatnt

SEQ ID NO: 18640 - DNA, 55 bp, Arabidopsis thaliana
  unsure at all n locations
  Clone ID: LIB146-002-Q1-E1-G11
tcgaaatgttgtcaaattggttcagaaagcttcaggngcttggngttattgactt

SEQ ID NO: 18641 - DNA, 469 bp, Arabidopsis thaliana
  unsure at all n locations
  Clone ID: LIB146-002-Q1-E1-G12
tggtggcntttgcagncccaaagtcngganancccgggtngccccaancgtccgaatttttttcgaaaaccccaaaatgaccacaccttccctatcttccatcctccggcacacacgtccaatcttcaaggaaaccctcagggccgccaggccaactcttcaaaatgctttgcccaatggtttccgcattgcctctgaatccaaggacggggacacctgcactgtgggcgtgtggattgatgctggcagcagatgggagaccgagaaaaacaatggtgtcgcgcacttccttgagcatatgaacttcaagggaacaggaaagaggtcgagacaggatattgagtttgggatggaaaagatgggtgctcatctgaatgcctacacttctcgggagcacacctggttattaccntgnagtgcttcaaaaaagaacgttccccgangcagttgaatattcttgctgganatc

SEQ ID NO: 18642 - DNA, 358 bp, Arabidopsis thaliana
  unsure at all n locations
  Clone ID: LIB146-002-Q1-E1-G4
tggtggncnctgcgnccacaagtccganaantcccgggnccacccaancgtccagttactaagcaagcagccttggaaaatgactcttctgcgtattgcctcagatacgtaaagcagttactgtgcgtgtccggagactgaaaagcctgaagtanggaaacaaagtagttttatcagacaaaaaaaagatttttgataagattcaagttggatgcccttaataccttatcgatgttgacagctggtgcgtacttgtctgtttgtgttttctctttgtcaagaaggaaatagactctagtatcgactttagatgtctcgtgccacgacttcacagctgtttccatagtctcaacaataa

SEQ ID NO: 18643 - DNA, 270 bp, Arabidopsis thaliana
  unsure at all n locations
  Clone ID: LIB146-001-Q1-E1-B9
tgggtctcntggcctagaaagccanaattcccgggnccacccacacgtcnangcgagtcaacgggtgagtaaacccgtaaggcgcaaggaagctgattggcgggatccctcgcgggtgcaccgccgaccgaccttgatcttctgagaagggttcgagtgtgagcatgcctgtcgggacccgaaagatggtgaactatgcctgaacggggtaaagccaaaaggaactcngggnggaancccccaacgatactgnngtttnaaaccnttccc

SEQ ID NO: 18644 - DNA, 403 bp, Arabidopsis thaliana
  Clone ID: LIB146-001-Q1-E1-C10
acaacgtccgcgtctttttgatgtgtgtatcatgttggcgcctggacctcgcccgccacatatggaataaatgccctacagagattttcgttgctctgcaattgttatcatcagctgtatagcctgtattgcaatggatggttaccaaaatgccacttctctccttgttgctatgttgaacaacataatgtgatgtgttctaaaagcatgtgccttgatttcagatttaacatcagggaagcaagttcactccctctgccacaaatttgtatctttcttccacttatgttagtgatggggctagattttggaagcgagtgcatgtgaattccataaagctcgggtttgaatcaaatggtttgatacaaagtgggctgattgatatgtacaggaagtataggtt

SEQ ID NO: 18645 - DNA, 453 bp, Arabidopsis thaliana
  unsure at all n locations
  Clone ID: LIB146-001-Q1-E1-C11
ttggtgtgccctggcccgtacanagtccaagaagtcccgggccgacccaaacgtcagcctggttttgcagccttgccaaaggcatttagtccatggcattgatttgatcgtaaaaggtacaactcaagacggcaaggttatactgtcacccttggagatgcgttctcagttctacattctgtgttatgatgtgcaaaacaatgatttgagaaaggttgaaatcacaggagtaccacgcctttggttgcataaagaatgcaattttgacttgaagtttatggatgagagtgagagcttcatctacttggaaatttgaccaatacttttgacttttgtttgtgtaccagataagaatacagttaagttttttttttttcttctgtcaagattagtctcctacccataaatccaccgaaccctcgttaacatttattatcaatcaagancacaaag

SEQ ID NO: 18646 - DNA, 410 bp, Arabidopsis thaliana
  unsure at all n locations
  Clone ID: LIB146-001-Q1-E1-C3
acacgtccngactaatgctagcattcccgttgtttctcatctttagtccggttattgtaccagcagcctttgtcatcggtctagctatgactggattcctggcttcaggggccataggtctcaccggactatcatccatgtcgtgggtactcaactacatccgccgggccgggcagcatatcccggaggagcttgaggaagcgaagcatcgtttggctgacatggccgagtatgtgggacagaggactaaagatgctggacaaaccatagaagacaaagctcatgatgtccgagaggccaagacttttgatgtccgagaccgagacaccaccaagggtactcataatgtccgagacaccaaagactacataaancgtgtgttttgagtgaaccatgttgaataaaaaaaa

SEQ ID NO: 18647 - DNA, 409 bp, Arabidopsis thaliana
  unsure at all n locations
  Clone ID: LIB146-001-Q1-E1-C5
aagcgtccggcaaaaaatggcaaacaagttgttcctcgtctgcgcagctctcgctctctgcttcctcctcaccaacgcttccatctaccgcaccgtcgttgagttcgaagaagatgacgccactaaccccataggcccaaaaatgaggaaatgccgcaaggagtttcagaaagaacaacacctaagagcttgccagcaattgatgctccagcaagcaaggcaaggccgtagcgatgagtttgatttcgaagacgacatggagaacccacagggacaacagcaggaacaacagctattccagcagtgctgcaacgagcttcgccaggaagagccagattgtgtttgccccaactttaaaaaaanctgcnaaggccgttagactccagggacagcaccaaccaatgcaagt

SEQ ID NO: 18648 - DNA, 386 bp, Arabidopsis thaliana
  unsure at all n locations
  Clone ID: LIB146-001-Q1-E1-C7
agtcaccanaaccagcttgaccgcaacccaaggccattttacttagccggaaacaacccacanggtcaagtatggctacaaggacgagagcaacagccacagaagaacatcttcaatggatttggacccgaggttattgctcaagctttgaagattgatcttcagacagcgcagcaacttcagaaccaagatgacaaccgtggaaacattgtccgagtccaaggcccgttcggtgtcattaggccgcctttgaggggccagagacctcaggaggaggaagaagaagaagaaggacgacacggacgacacggtaatggcttagangaaancaancggaacggccaggtgcacngataacctcgatgatccgtctcgtgctgacgtgt

SEQ ID NO: 18649 - DNA, 70 bp, Arabidopsis thaliana
  unsure at all n locations
  Clone ID: LIB146-001-Q1-E1-C8
nccacagaagaacatcttcanctggatttgggcccgangttattgctcaagctttgaagattgatcttca

SEQ ID NO: 18650 - DNA, 453 bp, Arabidopsis thaliana
  unsure at all n locations
  Clone ID: LIB146-001-Q1-E1-C9
ttgntgcgccngccgtnannatccaanaangcccgggtcgacccaaacgtcngaacatattcaccattaccttcttcttctcctccttctccttcgtttctcactccaaatttggaaccctaaatcctaatatccttcgattagttctcttctctatcggnattcttaacgttgagaggagtctgatatttgccgtgactcaagagattccaggtgtttccgacggtatatatttacatatgggcgtcgttggntctgactctcctccctccgttaagattccttcgtatctctcctcgtcgtcttcgtctctcttctcccgttcctcgatttctttcaggaccactgagtctcgctctcgaatctgcgtttctggttacgcgaaatgcaatttgcctaaggnactaaacgggaacgctcgtgttccaattaataatgagacgacaattccta

SEQ ID NO: 18651 - DNA, 232 bp, Arabidopsis thaliana
  unsure at all n locations
  Clone ID: LIB146-001-Q1-E1-D1
tggtatccctgcggncnacaagtccgaaattcccggggccacccacncgtccaggccccctttggtctgaaatagccgtacgcactctggaggtagagcccaagaataataaagtaagagaagtaacccgggctatgagctatttcgtcgttttcttgccggagttcgctagccgttcaatccgatcttcccttcgcatggcagaagagcgcggctcgagactactctttca

SEQ ID NO: 18652 - DNA, 406 bp, Arabidopsis thaliana
  unsure at all n locations
  Clone ID: LIB146-001-Q1-E1-D12
acncgtccgcaagaacttccccgtttaaagtaatatcaccgcgtaggctctcttttgaaatccgattggctaatgcatcgataagcgttgatttccctgacccgctcgctccaagaacagccatcatctctccttcccgggcttcaccagaaataccattcaggagcaccttagtattcatctccatatcattaccatcaaaaggtgaattcccacaacaaggaaagggcttaaacttcttcttgatcttcacgctgtaagtcaagtctttgaaggaaagaacaaacggagaagaagaaggcacacgagaagacggaaccgaggaccagaaattggacgcaaccgcaatatccatagcccgactctggtcatccccctcatcttccacactcatgagaagttctgc

SEQ ID NO: 18653 - DNA, 457 bp, Arabidopsis thaliana
  unsure at all n locations
  Clone ID: LIB146-001-Q1-E1-D3
tggtatncctgcgncctacaagtccganaaagtcccgggtcgacccacacgtcnacaaacgttacgttctcgttttctcaaattccaaacaataccaagaaacctctacttgaaaagagaagattatcgccgcgtgtgtgcctaagagcgatggcgtctgagaaacaaaaacaacatgcacaacctggcaaagaacatgtcatggaatcaagcccacaattctctagctcagattaccaaccttccaacaagcttcgtggtaaggtggcgttgataactggtggagactctgggattggtcgagccgtgggatactgttttgcatccgaaggagctactgtggctttcacttacgtgaagggtcaagaagaaaaagatgcacaagagaccctacaaatgttgaaaggaggtcaaaacctcggactccaaggaacctatcgccattccaacggattta

SEQ ID NO: 18654 - DNA, 405 bp, Arabidopsis thaliana
  unsure at all n locations
  Clone ID: LIB146-001-Q1-E1-D5
aagcgtccggtgaaatttgattctccgatcactacaacgattccgatctgtcctccgtcgatttcgatcgtgattttgatattgtttcgacatgaaattggtgtgatctcgtttcgagtttcgtggcgtatttgcttattcgtttaagtgtgtggaattgattttcaatgggagataattctggtagaagtagaaactctatgatggcaactgtttcttctgggaaagagttgttacctaagagaagcttagtagctgctattccaagagctgttcagcaaaaaatctctaagcatgtttcgtttgggaataatggtagatttggaaagtggaaccgcgcgtaatgcaactgtgtttccaacccaaatccncggtttaagaagttgttcgaagggtttcaaaggc

SEQ ID NO: 18655 - DNA, 406 bp, Arabidopsis thaliana
  unsure at all n locations
  Clone ID: LIB146-001-Q1-E1-D8
aagcgtccggaaaattttgactcaaatgagttgatgggtcaaatgagttgatgagtcaattggtttgatgagtaaaatganttgggttgtaatggttaatggtttcaatggtttacccaattaacccatcaagttttgtaaaattgaattaaaccaactaaaatctctaaaccaatgccaatttaagtttaaccaacacatctaaaccaatttaataaaattaatatttttccaaatttcttaaatatacaagcgatgaaattgagaaaaagtaaactcgtaagttttccaccaaaaaacataaatccgtgatttttccgccaaaaacgtaaaccccgtgattttcctcgtcaaaaacgtaaacccgaagatttccccgccaaaaacgaaaatccgaagattttcc

SEQ ID NO: 18656 - DNA, 454 bp, Arabidopsis thaliana
  unsure at all n locations
  Clone ID: LIB146-001-Q1-E1-B8
ggtatccggtgnncctgaaagtaatagtccggaagtcccgggtcnacccaancgtccggtagctatgacgcttgactcagagtacttacgtggctcaatcgcagccgttcattccatgctccgccacgcgtcatgtccagaaaacgtcttcttccatctcatcgctgcagagtttgacccggcgagtccacgcgttctgagtcaactcgtccgatctactttcccgtcgctaaacttcaaagtatacattttccgggaagatacggtgatcaaccttatctcttcttcaatcagacaagctttagagaatccattgaactatgctcggaactacctcggagatattcttgatccatgcgtagacagagtcatttacctagactcggacatcatcgtcgtcgacgacntaacaaaagctttgggaacacgactttaacagagtcaangaatcatg

SEQ ID NO: 18657 - DNA, 451 bp, Arabidopsis thaliana
  unsure at all n locations
  Clone ID: LIB146-001-Q1-E1-D9
tgggtgnccctgnccgtganagtcanananntcccgggccgacccaaacgtcagaatcaataaagaggaagaaaaatgggtcgagtctcatctattatctctttctctttgacactcttgatcctcttcaatggctacactgcccaacagtggcccaacgagtgccagctcgatcaactcaatgcgctcgaaccatcccaaatcatcaagagcgagggtggtcgcatcgaggtctgggaccaccatgcaccccagctccgttgctccggctttgcctttgagcgtttcgtcattgagcctcagggtcttttcttgcccactttcttgaacgccggcaaactcacgtttgttgttcacggaaggggtctaatgggaagagttattccgggatgcgccgagacgttcatggagtcaccggtattttggagaaggtcaaggtcaagggtcagag

SEQ ID NO: 18658 - DNA, 449 bp, Arabidopsis thaliana
  unsure at all n locations
  Clone ID: LIB146-001-Q1-E1-E10
ttggtnccctggccgtacaaagtccaagaattcccgggncgacccanacgtcngcctaatcacaaacacacacaaatctctgaagtaaaatgacgttcccttctctttctgtctcatttctcttctttgccttcatattcgttacgcatgcattcgacctcagcatcatccagatgcaacagggaacatgtccgtacacggtggttgtcatgacaagctgtctttctccggagtcgacaagagatcagatcagcattgtttttggcgatgccgacggtaacaaggtgtatgcaccgaaactagggggtttggtaagaggaccagggggtttggggaagtgttcaacgaacacattccaagtcagaggtcaatgtttgaatgaccctatctgctctctctatatcaaccggaatgggacccgacggttgggtcccggagtccattgagat

SEQ ID NO: 18659 - DNA, 451 bp, Arabidopsis thaliana
  unsure at all n locations
  Clone ID: LIB146-001-Q1-E1-E11
ttggttnccctggccgtacaaagtccaagaantcccgggtcgacccaaacgtccggttaaagaatcttgaagcggataatgtcgagacggaggttctagtgtgtggaggtgcaccaaaaggatcatacaacctcgctagaaagaaaactttcgtgaaagcgcttgacacgtgtgcaaggatcaagattaacgatgccaaacctgaatgggcggttgagaagatgccacatgctagagttatgggagatatgattcctttgccaaacggagatgttttgctaatcaacggtggatcttttggtactgctgcatgggagcttggtcgtacaccggttttagcaccggacctataccatcccgagaatccggttggctctaggtttgaatcgctaaggccgactacaatcccgagaatgtatcactccgcggctattcttctacgtgacggtag

SEQ ID NO: 18660 - DNA, 403 bp, Arabidopsis thaliana
  unsure at all n locations
  Clone ID: LIB146-001-Q1-E1-A1
aancgtccgagtgaaggaacacttcgttgttacgaagatcggtgtcctcatcggttggctaagttgtctgaaggacaattgattgatgggagattggaatgtttgtatcatggntggcaatttgaaggagagggcaaatgtgtcaagattcctcagcttcctgcaagtgctaanattccaaaggctgcttgtgtgaagacntangangtgaangattcacaaggagttgtgtgggtgtggatgtcaacaaagacacctccaaaccctgagaancttccttggtttgagaatttcgctngacccggttttttcgacatttcgactactcatgagcntccntatgncnaatcnantcctttangacaaaccngaaggggttctgcncaaggtccctaccccncat

SEQ ID NO: 18661 - DNA, 461 bp, Arabidopsis thaliana
  unsure at all n locations
  Clone ID: LIB146-001-Q1-E1-A11
ttgnctgtccctgggccgtncanagtccanaaantcccgggccgacccaaacgtcanaancaaaacaaaaaatgggtttcattggtaagagtgtattagtgagtctcgtagcactttggtgcttcacttcctctgtcttcactgaagaagtgaaccatangactcaaaccccttctctagctcctgctcctgctccttaccaccacggccaccaccacccacaccctcctcatcaccaccaccctcaccctcaccctcancctcacncccacncaccggncaaatctcctgttaaacccccggttaaggcaccagtgtctcnacnagncaancctccggttaagcccccggtttacccacccaccaaagccccggtgaaacccccaactaaacccccgngtcaggccacntgtttccccaccaagcnaaacctcnggttaggncaccagtttaaccctcng

SEQ ID NO: 18662 - DNA, 450 bp, Arabidopsis thaliana
  unsure at all n locations
  Clone ID: LIB146-001-Q1-E1-A12
cttggtnntcctgccggtaanagtccaagaantcccgggncgacccaaacgtcngattctttctttctgatattataaacctccgatttggtttagttcaaaactagaagcagcaaaattctgaacacgtaaagctttgtttcactcagtgtttcccgatcagatccaatggagagaggtggttatcgaggaggtcgtggtgatggccgtggtagaggtggccgtggttatggcggagacggaggaggaggagaacaaggtcgtgatcgtggctacggcggcggagaacaaggtcgtggtcgtggtcgtggctcagagcgaggcggcggaaatcgtggtcaaggtcgtggtgaacaacaggattttcgaagccagagtcagcggggacctccgccaggtcacggtggccgtgggacgacgcagttccaacagcctcgaccacaggtggct

SEQ ID NO: 18663 - DNA, 464 bp, Arabidopsis thaliana
  unsure at all n locations
  Clone ID: LIB146-001-Q1-E1-A3
tggtatcntntgtgnncctgaaggnananagtccggaagtcccgggncgcntcaaacantnactgncagggaaccacttgtcatcgtcagcgtcttcgatctagccagtcaccagaaccagcttgaccgcaacccaaggccattttacttagccggaaacaacccacaaggtcaagtatggctacaaggccgagagcaacagccacagaagaacattttcaatggatttggacccgaggttattgctcaagctttgaagatcgatcttcagacagcgcagcaacttcagaaccaagatgacaaccgtggaaacattgtccgagtccaaggcccgttcggtgtcattaggccgcctttgaggggccaagagacctcaggaggaggaagaagaaagaaagnaggncgacattgaccaacaccggtaatggcttaaaggagacatctgcagcgccaggtgcancgaa

SEQ ID NO: 18664 - DNA, 456 bp, Arabidopsis thaliana
  unsure at all n locations
  Clone ID: LIB146-001-Q1-E1-A5
tggnngtcttnngccccaaangngaaaanccngnagtcccgggtcgacccaaacgtccgttcagggctcgctttttcacctatttaaaccatcattttcctttctccattttgccgtcatcacccaacaacaaaaccctagttttggtttctctggatctgaagaatctccatgactattctcatagatcgccactctgatcagaacggttcgtgatcctttgtactcgttttactttggatctttctttctctatgctctgttttgaaatgatcttattatagatttttttgatgattgagtttgagttactttagatgcaggagatgagattgtagagaagaatcaggggaatggtaaagaggaagaaacagagttggtgttagatgcaggttttgagggccctnaagacaaaggnccttnggtcacacctttagggattatgatgctgagagg

SEQ ID NO: 18665 - DNA, 407 bp, Arabidopsis thaliana
  unsure at all n locations
  Clone ID: LIB146-001-Q1-E1-A7
aancgtccgccaaaaacacactcgtgagcttataaaaaaaaatcaacaatgaagattcctctcttggggttacttttactaataagtcttgtcggctctccgacaagggctgaagaaggacctgtttgcccgaagaccgaaactcttagccgtgcaagttttccgganggctttatgtttggtactgcaaccgcagcctttcaggtggaaggtgcagtaaatgaaggttgcagaggtccaagcctgtgggacatctacaccaagaaatttccacatagagttaagaatcacaatgctgacgaggccgtcgatttctaccatcgctacaaggaggatatccaattgatgaaaaancctgaacactgatggttttagactttcnatttcgtggccaagaatatttcctc

SEQ ID NO: 18666 - DNA, 408 bp, Arabidopsis thaliana
  unsure at all n locations
  Clone ID: LIB146-001-Q1-E1-A8
angcgtccgctttacaatcagtcttgaaattcgaattgaatgaatttacaacctccagctaccttggcatttatcttcaggagaacattggtgagatactgatcgttcagtctggtgggagcaatgcactgagtcacaattccaagatcaacaagattcttttttttccaagggcctaaaaaatttcagacacatgaaaagttaaacatttacattcaagggggaaaacaggccatattcaagaatgtaaagtgtgatgtgatgtaccataaacatcagagtttttcctttcagcgagtatgcaaagaaggaacagaggcggctttgggaagtttggattttatctgctcaaacatattccccnactcctcaacagtanctggtgcattcctaaactgaggattctcg

SEQ ID NO: 18667 - DNA, 326 bp, Arabidopsis thaliana
  Clone ID: LIB146-001-Q1-E1-A9
aaacgtccgcaggtggattcttcttgatgaaagccttaacagaattcaggatcttctcattcttggcttgatcagaccaggaaggtaagagaccgggagtgtcaatcacccgtaccttaattccctgaaccaaaccctcaacatcttgaaccctctttgtccccatctggaatgcatcagtacaaaatttcacttcatcaaatatagaattgatcgttgcacttttaccaaccccactttttccgagaaccataatcgtacaagaaaaatcaagtggatcctgtccagcagcctcaagctgttctgccatggcactggcgcgatca

SEQ ID NO: 18668 - DNA, 460 bp, Arabidopsis thaliana
  unsure at all n locations
  Clone ID: LIB146-001-Q1-E1-B1
gggtnncnntggtggacctaaatgtaatagtccnggnnncncncacacgtccgaaataaagcagtgcagtggttgtagtgtggagacgcaagaggtgcttgatgctgaactctccgctcgtgttttgcggctagtaaatgttatggacagtggactgcatagacagagatatggtgaaataagtaaacaaaggcttgatcgtgccattcttaccttcttccaaaatttccggaagtcttacgttggtgatcaggccatgcattcatcaaaacagttgtatgccagattgaaagaactccttggactgcatgatcatcttgttctgttgaacgttattgttggcaagattgctacaaacttaaaatgttatacaagagagtgaagaagtcattaatcacacgccaaagttttgttcccgggagttggcatccgggatacatgaccggggaaagctgctttt

SEQ ID NO: 18669 - DNA, 454 bp, Arabidopsis thaliana
  unsure at all n locations
  Clone ID: LIB146-001-Q1-E1-B11
ttggcncncctggcccgtaaatnatccaaaaagtcccgggncgacccaaacgtcaagcaattattggctcagaagaaacgatgggctcattttggttgggttanctggtccttctggagctggcaaaaccattttcactgagaagattctcaattttatgcctagtattgctatcattaacatggacaactataatgatggtactcgtgttatcgatggaaactttgatgatccaaggttgactgactatgatacacttcttgacaatatacatggtctaagggatggaaaacctgttcaggttccantatatgacttcaagtcnagttctcgaataggttacagaacgcttgaggtgcctanctctcgcattgttattctagaaggcatatatgctttgagtgaaaaactacggcctttgctacatcttccgtggtctctgtcaccngggtgg

SEQ ID NO: 18670 - DNA, 451 bp, Arabidopsis thaliana
  unsure at all n locations
  Clone ID: LIB146-001-Q1-E1-B3
tggtntcnctgcgnctacaagtccgaaattcccgggncnacccacncgtccggaagaaaaatgggtcgagtctcatctattatctctttctctttgacactcttgatcctcttcaatggctacactgcccaacagtggcccaacgagtgccagctcgatcaactcaatgcgctcgaaccatcccaaatcatcaagagcgagggtggtcgcatcgaggtctgggaccaccatgcaccccagctccgttgctccggctttgcctttgagcgtttcgtcattgagcctcagggtcttttcttgcccactttcttgaacgccggcaaactcacgtttgttgttcacggaaggggtctaatgggaagagttattccgggatgcgccgagacgttcatggagtcaccggnaatttgannaaggcaaggtcagggtcagagtcaagggttccgtgaca

SEQ ID NO: 18671 - DNA, 455 bp, Arabidopsis thaliana
  unsure at all n locations
  Clone ID: LIB146-001-Q1-E1-B4
ttggntgnccctgagncgtacanagtccanaaantcccgggccgacccanncgtcngagaagataaaaatggctcgagtctcttctcttctttcnttctccttaacacttttgatccttttccatggctacgcggctcaacagggtcagcagggtcagcagtttccgaacgagtgccagctcgaccagctcaatgcgctcgagccttcanacgtactgaagagcgaggctggtcgcatcgaggtgtgggaccaccacgctcctcagctccgttgctcaggtgtctcctttgcacgttacatcatcgagtctaanggtctctacttgccctctttctttaacaccgcgaagctctccttcgtggctaaaggacgacgtcttatgggaaaagtgattcctggattcccccgaaacattccaagactcatnagagttccaaccacgcttcgaaggtca

SEQ ID NO: 18672 - DNA, 460 bp, Arabidopsis thaliana
  unsure at all n locations
  Clone ID: LIB146-001-Q1-E1-B6
tcntttctcggtggncctgaatgtanggatccngaagtcccgggtcnacccaancgtccggaaaacatacacaaatagcaaaacatggctaacaagctcttcctcgtctgcgcaactctcgccctctgcttcctcctcaccaacgcttccatctaccgcaccgttgtcgaattcgaagaagatgacgccagcaaccccgtaggtccaagacagagatgccagaaggagtttcagcaatcacaacacctaatagcttgccagagatggatgagcaagcaaatgaggcaaggacgtggtggtggtccttccctcgacgatgagttcgatttcgagggcncccagcanggataccaagctactccagcantgctgcaacgagcttcggcaggaagagccagtttgcgtttggccctacntnnaancnagnngccagggnnagttagccttnanggacagcaat

SEQ ID NO: 18673 - DNA, 461 bp, Arabidopsis thaliana
  unsure at all n locations
  Clone ID: LIB146-002-Q1-E1-B3
ttggtaggtnctgnaggccncanatccggaaatcccgggtcnacccaancgtccgataaaaatggctcgagtctcttctcttctttctttctccttaacacttttgatccttttccatggctacgcggctcaacagggtcagcagggtcagcagtttccgaacgagtgccagctcgaccagctcaatgcgctcgagccttcacacgtactgaagagcgaggctggtcgcatcgaggtgtgggaccaccacgctcctcagctccgttgctcaggtgtctcctttgcacgttacatcatcgagtctaagggtctctacttgcctctttctttaacaccgcgaaggctctccttcggtggctaaaggacaaggtcttatgggaaaantnntccctngantgnccccaancaatcccaaggactccatnanagntnccaacaagctttcaaagggcaaggtcaaa

SEQ ID NO: 18674 - DNA, 413 bp, Arabidopsis thaliana
  unsure at all n locations
  Clone ID: LIB146-002-Q1-E1-B5
angcgtccggaagatgatgcttaccgaaaacatattttgtaaaatacaaaattcttatatccgaatgtaactaatttgagaaagacggtctctatacgtatataaaatatatgtatatatgcctctctattctttgatgaacttcagtcaggataattaatttactaaaactcttccaaaatgtcacattccttcttcaatttantcctaatctctcttttcctctacaacanttgcattgcgcatcactatacattcacgttagggaagttccatataccaaactgtgtagcacnaaaggcganttttaancgttaanaggcangtttcccggaccgaattannaagggtcacanangggagacactactttatgtttaanggttcaaaanccgganctagtggnanacnat

SEQ ID NO: 18675 - DNA, 404 bp, Arabidopsis thaliana
  unsure at all n locations
  Clone ID: LIB146-002-Q1-E1-B6
angcgtccgccacaatgtatcttcctctcctctatcttctgcttctggcttcttgcttgacacatcaagctttaggccgtggtcgtggccggccatcaccggaaggaagcttggatccttcttctcgcatcaccgtaatcggagttgtctactgtgacacgtgttctatcaacactttctcaagacaaagctatttcttacaaggtgtggaagttcatgtgacatgtagattcaaagcaagttcaccaaaaacagcagaggaagtgaacatatcagtanacaagaacaacaaacagaagtggcgtgtacaanctcgagatccctcacgtagatggcatcgattgtgtcgacggaatcgctatatcatcacaatgcagtgccaagatacncaaaacctcctctga

SEQ ID NO: 18676 - DNA, 398 bp, Arabidopsis thaliana
  unsure at all n locations
  Clone ID: LIB146-002-Q1-E1-B7
aancgtccgaagaaataacaaaatggctcgagtctcttctcttctttctttcttcttaacacttttgatccttttccatggctacgcggctcaacagggtcagcagggtcagcagtttccgaacgagtgccagctcgaccagctcaatgcgctcgagcngtcacacgtactgaagagcgaggctggtcgcancgaaggtgtgggaccacaacgctcntnagctcngtngctcaggtgtctcctttgcacnttacatcatcaantctaagggntctctacttgccctctttctttaacaccgcngaagctctctttcgtggctaagggacnaggtcttatgggaaaagtgatccctggatgcgccnaaacattccaagactcatcanagttccnancac

SEQ ID NO: 18677 - DNA, 368 bp, Arabidopsis thaliana
  unsure at all n locations
  Clone ID: LIB146-002-Q1-E1-B8
angcgtccgaacaaaaagaaaatggttaagctcagcaatctcctcgttgcaaccttcggggttctcctcgtccttaacggctgccttgcgangcagtcacttggggttcctcctcagctacagaacgagtgtaacctcgacaacctagatgttctccaagccaccgaaactatcangagtgaagccggtcagatcgagtactgggaccacaaccaccctcagctccgatgtgttggtgtttcngttgctcgttatgtaattgaacaaggncggtctttacttgccnaccttcttcactttcccaaaaaaatttccnnacncntttanagggacngggnatcacacgggaaaagtgntgcncctggnta

SEQ ID NO: 18678 - DNA, 385 bp, Arabidopsis thaliana
  unsure at all n locations
  Clone ID: LIB146-002-Q1-E1-C11
cgttttctcttggatttacaagtacgcaacgggagagcacccacagggatcagacaagttggacagtgcaaggatgaagttgggaagcaaagctcaggatctgaaagacagagctcagtactacggacagcaacatactggtggggaacatgaccgtgaccgtactcgtggtggccagcacactacttaagttaccccactgatgtcatcgtcatagtccaataactccaatgtcggggagttaagtttatgaggaataaagtgtttanaatttgatcagggggagataatnaaaaccgagtttgaatcnttttgttataagtaatgtttatgtgtgtttccatatggttgtcaaatggtaccatgttttttttcctcccctaaa

SEQ ID NO: 18679 - DNA, 363 bp, Arabidopsis thaliana
  unsure at all n locations
  Clone ID: LIB146-002-Q1-E1-C3
ggtgctnctgcagcccacaaagtccggaaantcccgggnccacccaancgtccnattttttggtaaatttggtcgctatatttgactacttgtactctgctttgagaagaaaaataaaaccatttttgggtgatangtgactgaataaacatctcttgtctcttgatggatcnactanggtctggagattagttcgtttattgaactagtgttttagacaatgcaagagttccatagnagcacagattcattgccttgtcctgcaacttcttgggatanctctgtcttcaccaactcaaatgtccaaggatcancatccctgngcganancaacactttnnagcnttggcatggacgatnaaa

SEQ ID NO: 18680 - DNA, 452 bp, Arabidopsis thaliana
  unsure at all n locations
  Clone ID: LIB146-002-Q1-E1-C4
tggtgntcctgcgcctacatagtccganaagtcccgggtccacccaaacgtcnataaaaatggctcgagtctcttctcttctttctttctccttaacacttttgatccttttccatggctacgcggctcaacagggtcagcagggtcagcagtttccgaacgagtgccagctcgaccagctcaatgcgctcgagccttcacacgtactgaagagcgaggctggtcgcatcgaggtgtgggaccaccacgctcctcagctccgttgctcaggtgtctcctttgcacgttacatcatcgagtctaagggtctctacttgccctctttctttaacaccgcgaagctctccttcgtggctaaaggacgangtcttatggggaaaagtgatccctggatgcgccganacattccaagactcatcagagttccaaccacgcttcgaaggtcaaggtca

SEQ ID NO: 18681 - DNA, 413 bp, Arabidopsis thaliana
  unsure at all n locations
  Clone ID: LIB146-002-Q1-E1-C5
aagcgtccgaacaaacaaaaagaaaatggttaagctcagcaatctcctcgttgcaaccttcggggttctcctcgtccttaacggctgccttgcgaggcagtcacttggggttcctcctcagctacagaacgagtgtaacctcgacaacctagatgttctccaagccaccgaaactatcaagagtgaagccggtcagatcgagtactgggaccacaaccaccctcagctccgatgtgttggtgtttccgttgctcgttatgtaattgaacaaggcggtctttacntgcccacttcttcacttccccaaaaatttcctangtcgttcaaangaacngggtatcanccggaagaagtggtccctgngatntgcccganaacttcagnggactccgnangccggatgcaagggnnaa

SEQ ID NO: 18682 - DNA, 461 bp, Arabidopsis thaliana
  unsure at all n locations
  Clone ID: LIB146-002-Q1-E1-C8
gcnntancntgagnggccctgaaaggcncttagtccgggngnccncgggtcganncaagcctcnncncagcgtcnttacacaaagatctctattggtacttctcaaattaaatggatcacaaaatcctactaacacctcccaaatctttatacaccaaatgtatcataaccatcatttacgtagtatcaatctctcatctaaatgcccatttcataacttcatgcaaacaaaccccataccctagcgtctgcgaccaccacatgtctaattcacctctcaaacctttagacgaccaaacggatgggttcactttccacgaccttgtggtcagctccaccatggaccaggccgtacaactacaccgccttgtgtcttccgtgaaacagcatcattctctccacaaacacgcaacatcagctttgtttgactgcttggagctctacganngacactatagnag

SEQ ID NO: 18683 - DNA, 405 bp, Arabidopsis thaliana
  unsure at all n locations
  Clone ID: LIB146-002-Q1-E1-C9
aancctccggtganaanngtttcngtctagaagcttttaaggattaagactctccaaaattttgacgccgtgttattctcttcccgtctctcatggatccttcaagacgaccaccgaaggactctccttacgcgaatctattcgatctcgagccgttgatgaagtttagaattccgaaacctgaagatgaagttgattattatgggagtagtagccaggatgaaagtanaagcactcaaggtggggtagtggcaaactacagcaatgggtctaaatcgagaatgaatgcgagctccaagaagagaaagcggtggacagaagctgaggatgcangaggacgatgatgatctctacaatcaacatgttactgangagcactacccgatcaatgcttggggaacatgt

SEQ ID NO: 18684 - DNA, 472 bp, Arabidopsis thaliana
  unsure at all n locations
  Clone ID: LIB146-002-Q1-E1-B11
tttcnggctttggtgncccananaggnacatagtccggaagtcccgggncgacccaancntccgggccgcctttgaggggccagagacctcaggaggaggaagaagaagaagaaggacgacacggacgacacggtaatggcttanaggagaccatctgcagcgccaggtgcaccgataacctcgatgatccgtctcgtgctgacgtgtacaagccacagctcggttacatcagcactctcaacagttacgatctccccatccttcgcttcatccgtctctcagccctccgtggatctatccgtcaaaacgcaatggtgcttccacagtggaacgcaaacgcgaacgccattctttacctgacagacggggaaagcccaaatccagatngtaaacgacaatngtaacagaagtgttttgaacgggncaaagttctctcaaagggacaagctcatagcccgtnccancaaaggt

SEQ ID NO: 18685 - DNA, 404 bp, Arabidopsis thaliana
  unsure at all n locations
  Clone ID: LIB146-002-Q1-E1-D11
aancgtccgtacacgctttccttcttcttctctttctccgatttttattttttttactatttgtgattttgaattttccggcgatggcgtcaacgtcggcggaaatggaccaattaacatcaggcgcgagcaatcggataatatttatcttgagaacgcttaggaagtgtctcgtcttcgttctctctctcgtcctttctcttctccttantcttcgtctccgtcctcgtcgccgtgtctctcctctttcatcncctganngatgangctgttccggctccttcgaggggatggaagacggaagatggcgtggaagctggangaggaagatacggcnagacgtcgttccttaagcggaaggcgtngagatngccggagatggngagatctcttgttcgttgttt

SEQ ID NO: 18686 - DNA, 214 bp, Arabidopsis thaliana
  unsure at all n locations
  Clone ID: LIB146-002-Q1-E1-D2
tangtttctagatcttttctttcttccgcgaaacnancatnagagagtgcatttcgatccacattggtcaggccggtntccangtcggaaatgcttgctgggagctttactgtcttgaacatggcattcancctgatggccagatgccgcagtgacaagactgttggcggaagtgacnatgctttcaagcaccttcttcantgagacnggtgca

SEQ ID NO: 18687 - DNA, 453 bp, Arabidopsis thaliana
  unsure at all n locations
  Clone ID: LIB146-002-Q1-E1-D4
tggtntncctgcgcctacaagtccgaaaattcccgggtcgacccangcgtccngcaagctccttcaatacatttcatcgtggggcatggtgcacaccaccacgtttgtttcttgaggatcagtttgacgtagtccctccagagaatgcttctgtaagttcatatgggaagaagtctgttgtagaggaacgtgtcaagaagaagccccaacctgtgaagattagtccttggactctagctcgtctcaatgcagaagaagtttcaaaagcagcagcagaagcaagaaagaaatccaaaataatccagcctgtggcgagacgggaaaatccattttgttggcttagaagcaagcagcagcttcggaagcagtggccgtanaatgttcccaacanaatatgaaggtgttaataataacgggaagcagcgaaggcaatcaaagcgcatacggttacca

SEQ ID NO: 18688 - DNA, 406 bp, Arabidopsis thaliana
  unsure at all n locations
  Clone ID: LIB146-002-Q1-E1-D5
aagcgtccgaaaaatggctcgagtctcttctcttctttctttctccttaacacttttgatccttttccatggctacgcggctcaacagggtcagcagggtcagcagtttccgaacgagtgccagctcgaccagctcaatgcgctcgagccttcacacgtactgaagagcgaggctggtcgcatcgaggtgtgggaccaccacgctcctcagctccgttgctcaggtgtctcctttgcacgttacatcatcgagtctaagggtctctacttgccctctttctttancaccgcgaaagctctccttcgtggctaaaggacgaggtcttatgggaaaagtgatccctgtatgcgccgaaacattccaaagactcatcagagttcnaancacncttcgaaggtcaaaggg

SEQ ID NO: 18689 - DNA, 462 bp, Arabidopsis thaliana
  unsure at all n locations
  Clone ID: LIB146-001-Q1-E1-G5
cggtanntcgtgtgnccctgaaatgtacatagtccggaantcccgggtcnacccanacgtccgctctacctacagagagagagactgaaccagacgactttcagtttcagttccagtttcaaagatctctttttcgtttctcgctgtctgtagcatcaatggcaatcgcttcctgcttcttctgtgttccaanaccgaacacagctatctctgaatccaatctgacatggcctcacatcgcttcgtttcctagactctcttcatcttcctcttttaacggtgtaatctctgcaaagtcaatctcttttaaccgccgtgtacctattacccctgttttatccgcttcaagtggtaacggcggntctgataataacggaggaggtcttantggtggtggtggtggtggcgattgggnggnangaatgangggaatggacaanggngacgangacaggggantgg

SEQ ID NO: 18690 - DNA, 454 bp, Arabidopsis thaliana
  unsure at all n locations
  Clone ID: LIB146-001-Q1-E1-G7
nntanctcggtgctcctgaatgtaacagtccggaagtcccgggtcnacccaancgtccgattttcgccgcgtggattgatatgacgactctctttcgccggaagtcaatcggaatccgcgacaacttcttccttcaatccctttgatttttttttggctctacttatcccaaacccttcaaatcttcaggtccaatctcttcttctatttgttttttaattaaaaaaatccggcgaaaggtgaagctcttggattcgagtggtggctagtaatcgatttcggtagtttagaagtagtttataggttttatcagctttcgatttgatggagccgcgagtcggaaacaagtttcggctcggaaggaagatcggcggtggatcattcggagagatctatcttggtaccaataaccaagacaaatgaagaagtggctattaaacttgaaaatgtgaaa

SEQ ID NO: 18691 - DNA, 361 bp, Arabidopsis thaliana
  unsure at all n locations
  Clone ID: LIB146-001-Q1-E1-G9
ttggtgnccctggncgtnanagtccaaaaantcccgggccgacccaaacgtcattcgtggaatgcttccaaagggacggcttgggagagctctgttcaatcacctgaaggtgtacaaaggccctgaccatcctcacgaggcccagaaaccgcttgatctgcctatcagggacaagagaatacagctgcaaaaatagaagctccaccactgttccattatcgccaagcgcagagagttttttcttctcaggtttctgtattttcttcatcccaaaaccagaggaggctttacagattcttgatttcgcttctatcaactctcttatgctacaaaactttctaatttgaaatatttctcgtta

SEQ ID NO: 18692 - DNA, 462 bp, Arabidopsis thaliana
  unsure at all n locations
  Clone ID: LIB146-001-Q1-E1-H3
tttggtnnncctgngcctacaaagtccgaaaattcccgggtccgacccanacgtccnaaacatacacacatagcaaaaaatggcaaacaagttgttcctcgtctgcgcagctctcgctctctgcttcctcctcaccaacgcttccatctaccgcaccgtcgttgagttcgaagaagatgacgccactaaccccataggcccaaaaatgaggaaatgccgcaaggagtttcagaaagaacaacacctaagagcttgccagcaattgatgctccagcaagcaaggcaaggccgtagcgatgagtttgatttcgaagacgacatggagaacccacagggacaacagcaggaacaacagctattccagcagtgctgcaacgagcttcgccaggaaanagncaaatttgtgttttgcccaaccttgaaacaagctgccaaggccgttagactccagggacagcacca

SEQ ID NO: 18693 - DNA, 461 bp, Arabidopsis thaliana
  unsure at all n locations
  Clone ID: LIB146-001-Q1-E1-H6
tcgnngncctggtgcccctaaaaggtacanagtccggaantcccgggtngacccaancgtccgcccacgcgtccgataaaaatggctcgagtctcttctcttctttctttctccttaacacttttgatccttttccatggctacgcggctcaacagggtcagcagggtcagcagtttccgaacgagtgccagctcgaccagctcaatgcgctcgagccttcacacgtactgaagagcgaggctggtcgcatcgaggtgtgggaccaccacgctcctcagctccgttgctcaggtgtctcctttgcacgttacatcatcgagtctaagggtctctacttgccctctttctttaacaccgcgaagctctccttcgtggctaaaggacgaggtcttatgggaaaantgattccgggatnngcggaaancattccaaggactcatcaggagttccaaccaangct

SEQ ID NO: 18694 - DNA, 405 bp, Arabidopsis thaliana
  unsure at all n locations
  Clone ID: LIB146-001-Q1-E1-H7
aancgtccgcttttttttcgtgtcagattcgctttctctacggctggactagaaggattagggatttaccggtggaagaataactccagagataaatctgtaaccatggatatgatgaagaagcgtaagctcgatgagaacggtaacggactcaataccaacggtggcggaaccattggtccaactcgattgtcgccgcaagacgcgaggaagattatcgagcgattcaccantgatcagctgctcgacttattgcaagaggctatcgtacgccatcccgacgtgcttgaatctgtccgattaaccgccgactctgatatctcgcagcggaagctattcatccgtgggctcgccgngggttacaactacggaaggnctccgttcgcttttttcnagttacngaga

SEQ ID NO: 18695 - DNA, 463 bp, Arabidopsis thaliana
  unsure at all n locations
  Clone ID: LIB146-001-Q1-E1-H8
tnnnngctctgtagcccnaaaagnngaaaagnccnnnnggccccnggaaaatccaaacgtccggncatgcttttttttctgaaggtaggagaaaagataaaacttattatattaattaatatattaattaaatcaaaatgaaagtttgaaactcatgtaattactctcttttgtttaatccaagaaaaacaaaaaatctataagaaatctcattcaattagacattcaattagatataaagttcaaagtaggttaaagttaaaaaactggtacaccaaaacaaaagagttggttgtcgagccgtatgaggtaggaaactctcaagtacggttctcagggagggaattgatccgcctattccgaccgtggagaacaggccattcaacaangatgttctgaaatggccggaaggctgggtcgctcaanccgccggagtantgggaaccaggctannaacgcctta

SEQ ID NO: 18696 - DNA, 451 bp, Arabidopsis thaliana
  unsure at all n locations
  Clone ID: LIB146-001-Q1-E1-H9
ttggttnccctggccgtacaaagtccaanaantcccgggncgacccanacgtcngccaaaattacactgtaaatttggcatttcgagaagaagaagagggagtgatggaattgcaaggagaggaaagcaaaacggcgacgtattgcgtgacgggtgcaagtggatacatcggttcttggttggttaagtctcttctccaaagaggttacacagtccatgccactctcagagatcttgcaaaatctgaatactttcaatctaaatggaaggaaaatgaacggctcagattattccgagcggatcttcgagatgacggcagctttgacgacgccgttaagggttgtgacggcgtcttccatgtcgccgcttccatggagtttgatatctcatcagatcacgttaatctcggtacgaccttttcgttgcaccggtcctttttttttgagcacaa

SEQ ID NO: 18697 - DNA, 404 bp, Arabidopsis thaliana
  unsure at all n locations
  Clone ID: LIB146-002-Q1-E1-A10
aaacgtccggtcaccttgtgggaagttggatccagagaaaaggttgtcacagaacctttcaagatatggaatatggcggcttgttctgtgatcttccagggttctatagtcaaagagccatcgatatccgtcactcgtgtagcatggagcccanatggaaacttgcttggggtttcttttactaaacatctgatccatgtatatgcttaccaaggctcagacctacgtcaacacctcgagattgatgctcatgtaggctgtgtgaatgacttggcgttcgcccacccaaataagcaaatgtgtgttgtgacttgtggggatgacaaattgattaangtgtgggatttgagtggggaagaagctcttcacctttngaagggcacgaaggcaccagttttattcca

SEQ ID NO: 18698 - DNA, 469 bp, Arabidopsis thaliana
  unsure at all n locations
  Clone ID: LIB146-002-Q1-E1-A12
tgtnnnanncctggtgncccctgaaaggtacattagtccgggaagtcccgggtcnacccaaacgtccgctctatcttgaaaaggagaaataaataattaatcactaagcgaaagagatttgatctaaagtaatacaaataaaccttgattgagattgtnaaggagaagagtttaaaagcatggatacagagagaggatcaataagttcatcagaaatatccagaactgctcatctacaagatagaacagttgcttgtcttcctccttcgtacggacaacttgtgaccattcttagcatcgatgggtggtggaatccgtgggatnattcccggcacaatcttaagcttacccttgaatcacaacttcaggaattggatggtgaggaggcaangcttgtggattatttcgatgtcatctcaggaacaancaccngacgtttnattnctggcnaatgttgancgccacaagg

SEQ ID NO: 18699 - DNA, 432 bp, Arabidopsis thaliana
  unsure at all n locations
  Clone ID: LIB146-002-Q1-E1-A3
tggtgnntngcagcccaantgtaaagtccnggntncncgnaaccntccaagctttcanncatgaatgtgtgcaaatcaagcaaaagtaacttgatttgttgggcttctttgttatacgttctccaaggtggttcaactaatattccaacattttttatattacatctttggtgaaccaatgttatcagaagggagcatgaaagctctttgtacttgtttttatcagtactcagtaggtattaatcaaatttgcatgatttgtggaaaacaagtggtcagtggtggatatgttcttgttgagtcacaattangttgaaaattaanggtgtaaagttaagatttcggtttganacctcgtctcaaccggtttgaacccaaattgggcctaaagagaggccaaagatanatgtaagctacaccgaaccggcccac

SEQ ID NO: 18700 - DNA, 407 bp, Arabidopsis thaliana
  unsure at all n locations
  Clone ID: LIB146-002-Q1-E1-A8
aagcgtccgataaaaatggctcgagtctcttctcttctttctttctccttaacacttttgatccttttccatggctacgcggctcaacagggtcagcagggtcagcagtttccgaacgagtgccagctcgaccagctcaatgcgctcgagccttcacacgtactgaagagcgaggctggtcgcatcgaggtgtgggaccaccacgctcctcagctccgttgctcangtgtctcctttgcacgttacatcatcgagtctaagggtctctacttgccctctttctttaacaaccgcgaagctctccttcgtggctaaaggacgaggtcttatgggaaaagtgatnccctggatgcgccgaaacattccaaagactcatcagagttccaaccacgcttcgaaggtcaagg

SEQ ID NO: 18701 - DNA, 406 bp, Arabidopsis thaliana
  unsure at all n locations
  Clone ID: LIB146-002-Q1-E1-A9
aaacgtccgaaatataanaaataacaaaatggctcgagtctcttctcttctttctttcttcttaacacttttgatccttttccatggctacgcggctcaacagggtcagcagggtcagcagtttccgaacgagtgccagctcgaccagctcaatgcgctcgagccgtcacacgtactgaagagcgaggctggtcgcatcgaggtgtgggaccaccacgctcctcagctccgttgctcaggtgtctcctttgcacgttacatcatcgagtctaagggtctctacttgccctctttctttaacaccgcgaagctctctttcgtggctaagggacgaggtcttatgggaaaagtgatccctggatgcgccgaaacattccaaagactcatcagagttccaancacgctt

SEQ ID NO: 18702 - DNA, 452 bp, Arabidopsis thaliana
  unsure at all n locations
  Clone ID: LIB146-001-Q1-E1-G11
ttggtnnccctgccgtacaaagtccaaaaantcccgggccgacccaaacgtcaagattgccacaacacccggtgtagcccagtggttctacaacgacggacagcaaccacttgtcatcgtcagcatcttcgatctagccagtcaccagaaccagcttgaccgcaacccaaggccattttacttagccggaaacaacccacaaggtcaagtatggctacaaggacgagagcaacagccacagaagaacatcttcaatggatttggacccgaggttattgctcaagctttgaagattgatcttcagacagcgcagcaacttcagaaccaagatgacaaccgtggaaacattgtccgagtccaangcccgttcggtgtcattaggccgcctttgaggggccagagacctcaggaggaggaagaagaagaagaaggacgacacggacgacacggta

SEQ ID NO: 18703 - DNA, 303 bp, Arabidopsis thaliana
  unsure at all n locations
  Clone ID: LIB146-002-Q1-E1-B1
cttggtgccccaagtntgganagtcccgggnccacccaancntccannttcactaattccacatactcaggagagaaatggcaaccgaaaccgtattagccacggcggtgagcaatggcaaaagcaaaggatgttgcaagtccggtccaggttacgcgacgcctctcgccgccatggccggtccacgggaaaagctcatctatgtcactgccctttactccggaacggggcgagacnanccgggactacttggcaacggtngatgtggatccaaactcanccacattttcanngcgtcattca

SEQ ID NO: 18704 - DNA, 457 bp, Arabidopsis thaliana
  unsure at all n locations
  Clone ID: LIB146-001-Q1-E1-E4
tttggtgttncctgcgcctacanatccgaaaantcccgggtcgacccaaacgtccgctcttctcttctttctttctccttaacacttttgatccttttccatggctacgcggctcaacagggtcagcagggtcagcagtttccgaacgagtgccagctcgaccagctcaatgcgctcgagccttcacacgtactgaagagcgaggctggtcgcatcgaggtgtgggaccaccacgctcctcagctccgttgctcaggtgtctcctttgcacgttacatcatcgagtctaagggtctctacttgccctctttctttaacaccgcnaagctctccttcgtggctaaaggacgaggtcttatgggaaaagtgatccctggatgcgccgaaacattccaagactcatcagagttccnaaccaaggctttcgaaggtcaaggtcaaagccaagaggttccgt

SEQ ID NO: 18705 - DNA, 406 bp, Arabidopsis thaliana
  unsure at all n locations
  Clone ID: LIB146-001-Q1-E1-E5
aaacgtccgctcaatgcgctcgaaccatcccaaatcatcaagagcgagggtggtcgcatcgaggtctgggaccaccatgcaccccagctccgttgctccggctttgcctttgagcgtttcgtcattgagcctcagggtcttttcttgcccactttcttgaacgccggcaaactcacgtttgttgttcacggaaggggtctaatgggaagagttattccgggatgcgccgagacgttcatggagtcaccggtatttggagaaggtcaaggtcagggtcagagtcaagggttccgtgacatgcaccagaaagtagagcacctacggtgcggtgacaccattgcaacaccatctggtgtnacccaatnggttctacaacaatggaaatgancctctcattcttgttgca

SEQ ID NO: 18706 - DNA, 402 bp, Arabidopsis thaliana
  unsure at all n locations
  Clone ID: LIB146-001-Q1-E1-E6
aancgtccggaaatataagaaataacaaaatggctcgagtctcttctcttctttctttcttcttaacacttttgatccttttccatggctacgcggctcaacagggtcagcagggtcagcagtttccgaacgagtgccagctcgaccagctcaatgcgctcgagccgtcacacgtactgaagagcgaggctggtcgcatcgaggtgtgggaccaccacgctcctcagctccgttgctcaggtgtctcctttgcacgttacatcatcgagtctaagggtctctacttgccctctttctttaacaccgcgaagctctctttcgtggctaagggacgaggtcttatgggaaaagtgattcctggntgcgcggaaacatcnaagactcatcagagttccaaccatg

SEQ ID NO: 18707 - DNA, 401 bp, Arabidopsis thaliana
  unsure at all n locations
  Clone ID: LIB146-001-Q1-E1-E8
aancgtccgggtgatatcgctagtgctgacttggtgaatcatcttctcatcactgaaggtattgacaccatcatgcatttcgctgctcagactcacgtcgacaattccttcggtaacagtttcgagtttactaagaataatatctatggaactcatgtccttcttgaggcttgtaaagttactggtcagattaggaggtttattcatgttagtactgatgaagtttatggtgaaactgatgaggatgctcttgttggtaaccatgaggcttctcagctgcttccgacgaatccttactctgccacgaaagctggtgctgagatgcttgttatggcttatggtagatctatgggttgccctgttaattaacaactcgtgggaataacgtctatggaccgaat

SEQ ID NO: 18708 - DNA, 462 bp, Arabidopsis thaliana
  unsure at all n locations
  Clone ID: LIB146-001-Q1-E1-F1
tggtnnctcctgcggncnacaaagtccganattcccgggnccnacccacancgtccactccaggctctgcccactggatctacaactcaggagaacagccacttgtcatcatcgctcttctcgacatcgccaactaccaaaaccaactcgaccgcaaccctagagtgttccatttggccggaaacaaccagcagggaggctttggcggttcacagcaacaacaagaacagaaaaacttgtggagcgggttcgacgcacaggtcatagctcaagcattgaaaattgacgttcagttggctcagcagcttcagaaccaacangacagcagaggaaacatcgttcgtgttaagggacctttccaggtcgtgaggccacctctaaagacagccctaccagangcgagggatngggaacaccantttncccaanaggncancggccttgagggagnctatctgcang

SEQ ID NO: 18709 - DNA, 452 bp, Arabidopsis thaliana
  unsure at all n locations
  Clone ID: LIB146-001-Q1-E1-F10
ttggnnnncctgggccgtacannagtccganaagtcccgggtcgacccacaacgtccggaaaaatgggtcgagtctcatctattatctctttctctttgacactcttgatcctcttcaatggctacactgcccaacagtggcccaacgagtgccagctcgatcaactcaatgcgctcgaaccatcccaaatcatcaagagcgagggtggtcgcatcgaggtctgggaccaccatgcaccccagctccgttgctccggctttgcctttgagcgtttcgtcattgagcctcagggtcttttcttgcccactttcttgaacgccggcaaactcacgtttgttgttcacggaangggtctaatgggaagagttattccgggatgcgccgagacgttcatggagtcaccggtatttggagaaggtcaaggtcagggtcagagtcaagggttccgtga

SEQ ID NO: 18710 - DNA, 341 bp, Arabidopsis thaliana
  unsure at all n locations
  Clone ID: LIB146-001-Q1-E1-F11
cnttncaaancccnatagtgatgtcgtattanncatctantatctctttctctttganactcttgatcctcttcaatggntacactgcccaacagtggcccaacgagtgccagctcgatcaactcaatgcgctcgaaccatcccaaatcatcaanagcgagggtggtcgcatcgaggtctgggaccaccatgcaccccagctccgttgctccggctttgcctttgagcgtttcgtcattgagcctcagggtcttttcttgcccactttcttgaacgncggcaaactcacgtttgttgttcacgggnaggggtctanntggggaanagtnantccgggatgc

SEQ ID NO: 18711 - DNA, 456 bp, Arabidopsis thaliana
  unsure at all n locations
  Clone ID: LIB146-001-Q1-E1-F12
ttggtgtgccctgncccgtgaanagtcaaanaagtcccggcncgacccaaacgtcaaggaaatagtgtttttaaccaaaagaaaaaaaagatactgtaaactatataaattttctgtaatctatagaaagaatcaaagtgaagttgcagaaataaagaccaantcaaatgaataatttattaaattgataaggtggcaaccaacanatatattgcacttaatatagtaaaaaatcatacattgctgtcagtgagtagtaaaccaagtagtcacccatatataaatttctggaaaatatgaaactcctaatcctacatgacttaaaccttttttagataatttcattatcaaatggctattctttcaattcacccttatatctttgcacaacaatagagaganannangaagttcanaaaggnacatagngatctaantaaganaggtttttgggtc

SEQ ID NO: 18712 - DNA, 458 bp, Arabidopsis thaliana
  unsure at all n locations
  Clone ID: LIB146-001-Q1-E1-F3
ttggtnncncctgcgnctacaagtccgaaaantcccgggtcgacccacgcgtccnataaaaatggtcaaatcattatataaagactggagcaatgggaacgaaaacgggtgcatcaaaccaacatagttgataggcttgatgttaccttagcagctcttgttcttgctctagaccagcgtgaaactgcagtctcttgcttctcaatttcaaaaaacgatatagaacttcttttaagttcagcaaagtcaagtaccttccacctgcaaattccatttagttactactaaacagataattttatcctctctatatataccaatgccaataatcataacaccacgaaccatctttgctcaacgactacagcacaatcagctaagccttcttctgggttcgaaaacttctaaaaaaccntccngtaactttaatgcagcttgatatgttccatcacctaata

SEQ ID NO: 18713 - DNA, 423 bp, Arabidopsis thaliana
  unsure at all n locations
  Clone ID: LIB146-001-Q1-E1-F4
ttggtgnctcctgcgcctacanatccgaaaagtcccgggtcnacccacaacgtccacgaatagttagagatgccgcaagcaaagatcatatagcctaattgactacaagttgnataagcgatgaccctctttagatcgttctgtaatattccagtggttgccgcaaggaatgacgtcgtagctcctgcagaagtaataacaatcaaagccgtaggtgggtattcaaatanaggggagcaccttgctatcatgaaaacgccagctgttaccatagtanctgcatgaatcgaagcggatactggagtgggaccctccatagcatcgggtgaccaagtatgcgatcctatctgcgcggatttcccaacagcaccaactaaaanncaaactcnagggncggctactgncnngggaagntttngggna

SEQ ID NO: 18714 - DNA, 460 bp, Arabidopsis thaliana
  unsure at all n locations
  Clone ID: LIB146-001-Q1-E1-F7
nggtatctcggtgnacctgaatgtaatagtccggaantcccgggtcnacccaancgtccgcttggagaaagatacgacccatcgttatggggcaaacacttttaagttacacaggctcccagttccaagaccagggcaggtgctagggttggttggaaccaatggtattggaaaatcaactgctctgaaaattttggctggaaagctcaaaccaaatttgggccgtttcactagtcctccagactggcaagaaatcttgactcacttccgtggttcagaacttcaaaactacttcacacgtattctagaagataatcttaaggccattataaagcctcaatatgtcgaccacatcccaagagcagttaaaggcaatgttggagaggtccttgaccagaaggatgagaaganattagaaaggaagactctgttgccggatctggagctgaaccaaggtcat

SEQ ID NO: 18715 - DNA, 455 bp, Arabidopsis thaliana
  unsure at all n locations
  Clone ID: LIB146-001-Q1-E1-F9
ttggtgnccctgcgccgtacanagtccgaaaagtcccgggtcgacccanacgtccgctggagcaattgaagctgttttggttaatacaaatcagttctacaaatggtttactgatcttgaatcagcgatgaagtctgagacagaggaaaagtatcggcactatgttagtactttaactgagcgcatccagacgtgtgataatatacttcaccaggttgatgaaacacttgacctatttaacgaactgcaactacaacatcaaggagtaacaacaaagactaaaactcttcatgacgcatgtgaccgactgttaatggagaagcagaaattgatggaatttgcagaagctctaaggagtaagctcaactattttgatgaactggagaatgtatcctctaatttttattcaccaaatatgaatgtatcaaactcaaactttctcccactactgaaag

SEQ ID NO: 18716 - DNA, 461 bp, Arabidopsis thaliana
  unsure at all n locations
  Clone ID: LIB146-001-Q1-E1-G1
ttggtgctctgcgncctacatatccganaagtcccgggtcnacccanaacgtccnagaaatataagaaataacaaaatggctcgagtctcttctcttctttctttcttcttaacacttttgatccttttccatggctacgcggctcaacagggtcagcagggtcagcagtttccgaacgagtgccagctcgaccagctcaatgcgctcgagccgtcacacgtactgaagagcgaggctggtcgcatcgaggtgtgggaccaccacgctcctcagctccgttgctcaggtgtctcctttgcacgttacatcatcgagtctaagggtctctacttgccctctttctttaacaccgcgaagctctctttcgtggctaagggacgaggtcttatgggaaaanggnttcctggaatgcgnccgnaacattccagggnctnatcnggggtnccanccacgcgttcgg

SEQ ID NO: 18717 - DNA, 450 bp, Arabidopsis thaliana
  unsure at all n locations
  Clone ID: LIB146-001-Q1-E1-G10
tggattncccgtggccgtgaanagtcnaaaaantcccgggccgacccaaacgtcaggataaaaatggctcgagtctcttctcttctttctttctccttaacacttttgatccttttccatggctacgcggctcaacagggtcagcagggtcagcagtttccgaacgagtgccagctcgaccagctcaatgcgctcgagccttcacacgtactgaagagcgaggctggtcgcatcgaggtgtgggaccaccacgctcctcagctccgttgctcaggtgtctcctttgcacgttacatcatcgagtctaagggtctctacttgccctctttctttaacaccgcgaagctctccttcgtggctaaaggacgaggtcttatggggaaaagtgatccctggatgcgccgaaacattccaagactcatcagagttccaaccacgcttcgaaggtca

SEQ ID NO: 18718 - DNA, 448 bp, Arabidopsis thaliana
  unsure at all n locations
  Clone ID: LIB146-001-Q1-E1-E12
ttggncgcctggcggtnanagtccagaantcccgggncgacccaaacgtcngntccacattactcaaagatctctattggtacttctcaaattaaatggatcacaaaatcctactaacacctcccaaatctttatacaccaaatgtatcataaccatcatttacgtagtatcaatctctcatctaaatgcccatttcataacttcatgcaaacaaaccccataccctagcgtctgcgaccaccacatgtctaattcacctctcaaacctttagacgaccaaacggatgggttcactttccacgaccttgtggtcagctccaccatggaccaggccgtacaactacaccgccttgtgtcttccgtgaaacagcatcattctctccacaaacacgcaacatcagctttgtttgactgcttggagctctacgaangacactatagaccang
